(19) United States
(12) Patent Application Publication
(10) Pub. No.: US 2008/0168572 A1
(43) Pub. Date: Jul. 10, 2008

(54) Nanoarchaeum genome, Nanoarchaeum polypeptides and nucleic acids encoding them and methods for making and using them

(75) Inventors: Karl O. Stetter, Regensubrg (DE); Elizabeth Waters, San Diego, CA (US); Keith Kretz, San Marcos, CA (US); Mircea Podar, San Diego, CA (US); Toby Richardson, San Diego, CA (US); Michiel Noordewier, San Diego, CA (US)

Correspondence Address: VERENIUM C/O MOFO S.D., 12531 HIGH BLUFF DRIVE, SUITE 100, SAN DIEGO, CA, 92130-2040, US

(73) Assignee: Diversa Corporation, San Diego, CA (US)

(21) Appl. No.: 10/428,340

(22) Filed: May 1, 2003

Related U.S. Application Data
(60) Provisional application No. 60/377,447, filed on May 1, 2002.

(51) Int. Cl. A01K 67/00; C07H 21/04; C07K 16/00; C12N 15/00; C12N 1/34; C12Q 1/68; C40B 50/06; G01N 33/48; G06G 7/48; C40B 40/10; G01N 33/53; C12N 5/06; C12N 5/00; A01H 5/00

(52) U.S. Cl. 800/8; 536/23.2; 536/24.3; 536/24.33; 530/350; 435/320.1; 435/325; 800/298; 536/24.5; 435/375; 435/183; 530/387.3; 506/18; 435/7.1; 435/6; 703/11; 702/19; 536/25.41; 506/26; 800/288; 435/252.1

(57) ABSTRACT

The invention provides a genome of the hyperthermophile Nanoarchaeum equitans, polypeptides, including enzymes, structural protein and binding proteins, derived from this genome, polynucleotides encoding these polypeptides, methods of making and using these polynucleotides and polypeptides. The invention also provides isolated hyperthermophile Nanoarchaeum equitans.

### RELATED APPLICATIONS

[0001] This application claims the benefit of priority under 35 U.S.C. § 119(e) of U.S. Provisional Application No. 60/377,447, filed May 1, 2002. The aforementioned application is explicitly incorporated herein by reference in its entirety and for all purposes.

### REFERENCE TO SEQUENCE LISTING SUBMITTED ON A COMPACT DISC

[0002] This application includes a compact disc (submitted in duplicate) containing a sequence listing. The entire content of the sequence listing is herein incorporated by reference. The sequence listing is identified on the compact disc as follows.

| File Name | Date of Creation | Size (bytes) |
|---|---|---|
| Sequence Listing.txt | May 1, 2003 | 2,592,438 |

### FIELD OF THE INVENTION

[0003] This invention relates generally to microbiology. In alternative aspects, the invention provides a genome of the hyperthermophile Nanoarchaeum equitans, polypeptides, including enzymes, structural proteins and binding proteins derived from this genome, polynucleotides encoding these polypeptides, methods of making and using the genome and these polynucleotides and polypeptides. The invention also provides isolated hyperthermophile Nanoarchaeum equitans.

### BACKGROUND

[0004] Several theoretical and experimental studies have endeavored to derive the minimal set of genes that are necessary and sufficient to sustain a functioning cell under ideal conditions, that is, in the presence of unlimited amounts of all essential nutrients and in the absence of any adverse factors, including competition. A comparison of the first two completed bacterial genomes, those of the parasites Haemophilus influenzae and Mycoplasma genitalium, produced a version of the minimal gene set consisting of approximately 250 genes. Very similar estimates were obtained by analyzing viable gene knockouts in Bacillus subtilis, M. genitalium, and Mycoplasma pneumoniae. With the accumulation and comparison of multiple complete genome sequences, it became clear that only about 80 genes of the 250 in the original minimal gene set are represented by orthologs in all life forms. For approximately 15% of the genes from the minimal gene set, viable knockouts were obtained in M. genitalium. Unexpectedly, these included even some of the universal genes. Thus, some of the genes that were included in the first version of the minimal gene set, based on a limited genome comparison, could be, in fact, dispensable. The majority of these genes, however, are likely to encode essential functions but, in the course of evolution, are subject to non-orthologous gene displacement, that is, recruitment of unrelated or distantly related proteins for the same function. Further theoretical and experimental studies within the framework of the minimal-gene-set concept and the ultimate construction of a minimal genome are expected to advance our understanding of the basic principles of cell functioning by systematically detecting non-orthologous gene displacement and deciphering the roles of essential but functionally uncharacterized genes. Global knockout mutagenesis of the mycoplasmal genes, aimed at delineating a minimal gene set, has resulted in estimates that are very similar to those produced by original comparative genomic analysis but has also shown that even some of the universal or highly conserved genes can be dispensable. These results could indicate that even absolute evolutionary conservation does not automatically entail indispensability of a gene under any conditions, but their definitive interpretation requires further experiments.

### SUMMARY OF THE INVENTION

[0005] The invention provides an isolated and/or a recombinant genome of a hyperthermophile Nanoarchaeum equitans (SEQ ID NO:1). The invention also provides an isolated hyperthermophile Nanoarchaeum equitans deposited as ATCC accession no. ______.

[0006] The invention provides isolated or recombinant nucleic acids comprising a nucleic acid sequence having at least about 50%, 51%, 52%, 53%, 54%, 55%, 56%, 57%, 58%, 59%, 60%, 61%, 62%, 63%, 64%, 65%, 66%, 67%, 68%, 69%, 70%, 71%, 72%, 73%, 74%, 75%, 76%, 77%, 78%, 79%, 80%, 81%, 82%, 83%, 84%, 85%, 86%, 87%, 88%, 89%, 90%, 91%, 92%, 93%, 94%, 95%, 96%, 97%, 98%, 99%, or more, or complete (100%) sequence identity to an exemplary nucleic acid of the invention, e.g., SEQ ID NO:1, SEQ ID NO:2, SEQ ID NO:4, SEQ ID NO:6, SEQ ID NO:8, SEQ ID NO:10, SEQ ID NO:12, SEQ ID NO:14, SEQ ID NO:16, SEQ ID NO:18, SEQ ID NO:20, SEQ ID NO:22, SEQ ID NO:24, SEQ ID NO:26, SEQ ID NO:28, SEQ ID NO:30, SEQ ID NO:32, SEQ ID NO:34, SEQ ID NO:36, SEQ ID NO:38, SEQ ID NO:40, SEQ ID NO:42, SEQ ID NO:44, SEQ ID NO:46, SEQ ID NO:48, SEQ ID NO:50, SEQ ID NO:52, SEQ ID NO:54, SEQ ID NO:56, SEQ ID NO:58, SEQ ID NO:60, SEQ ID NO:62, SEQ ID NO:64, SEQ ID NO:66, SEQ ID NO:68, SEQ ID NO:70, SEQ ID NO:72, SEQ ID NO:74, SEQ ID NO:76, SEQ ID NO:78, SEQ ID NO:80, SEQ ID NO:82, SEQ ID NO:84, SEQ ID NO:86, SEQ ID NO:88, SEQ ID NO:90, SEQ ID NO:92, SEQ ID NO:94, SEQ ID NO:96, SEQ ID NO:98, SEQ ID NO:100, SEQ ID NO:102, SEQ ID NO:104, SEQ ID NO:106, and all nucleic acids disclosed in the SEQ ID listing, which include all even numbered SEQ ID NO:s from SEQ ID NO:2 through SEQ ID NO:1073, over a region of at least about 10, 15, 20, 25, 30, 35, 40, 45, 50, 75, 100, 150, 200, 250, 300, 350, 400, 450, 500, 550, 600, 650, 700, 750, 800, 850, 900, 950, 1000, 1050, 1100, 1150, 1200, 1250, 1300, 1350, 1400, 1450, 1500, 1550, 1600, 1650, 1700, 1750, 1800, 1850, 1900, 1950, 2000, 2050, 2100, 2200, 2250, 2300, 2350, 2400, 2450, 2500, or more residues, encodes at least one polypeptide having an enzyme, structural or binding activity, and the sequence identities are determined by analysis with a sequence comparison algorithm or by a visual inspection.

[0007] In alternative aspects, the isolated or recombinant nucleic acid encodes a polypeptide comprising a sequence as set forth in SEQ ID NO:3, SEQ ID NO:5, SEQ ID NO:7, SEQ ID NO:9, SEQ ID NO:11, SEQ ID NO:13, SEQ ID NO:15, SEQ ID NO:17, SEQ ID NO:19, SEQ ID NO:21, SEQ ID NO:23, SEQ ID NO:25, SEQ ID NO:27, SEQ ID NO:29, SEQ ID NO:31, SEQ ID NO:33, SEQ ID NO:35, SEQ ID NO:37, SEQ ID NO:39, SEQ ID NO:41, SEQ ID NO:43, SEQ ID NO:45, SEQ ID NO:47, SEQ ID NO:49, SEQ ID NO:51, SEQ ID NO:53, SEQ ID NO:55, SEQ ID NO:57, SEQ ID NO:59, SEQ ID NO:61, SEQ ID NO:63, SEQ ID NO:65, SEQ ID NO:67, SEQ ID NO:69, SEQ ID NO:71, SEQ ID NO:73, SEQ ID NO:75, SEQ ID NO:77, SEQ ID NO:79, SEQ ID NO:81, SEQ ID NO:83, SEQ ID NO:85, SEQ ID NO:87, SEQ ID NO:89, SEQ ID NO:91, SEQ ID NO:93, SEQ ID NO:95, SEQ ID NO:97, SEQ ID NO:99, SEQ ID NO:101, SEQ ID NO:103, SEQ ID NO:105, and all polypeptides disclosed in the SEQ ID listing, which include all odd numbered SEQ ID NO:s from SEQ ID NO:3 through SEQ ID NO:1073. In one aspect these polypeptides have an enzyme, structural or binding activity.

[0008] In one aspect, the sequence comparison algorithm is a BLAST algorithm, such as a BLAST version 2.2.2 algorithm. In one aspect, the filtering setting is set to blastall -p blastp -d “nr pataa”-F F and all other options are set to default.

[0009] In alternative aspects, the enzyme, structural or binding activity comprises a recombinase activity, a helicase activity, a DNA replication activity, a DNA recombination activity, an isomerase, a transisomerase activity or topoisomerase activity, a methyl transferase activity, an aminotransferase activity, a uracil-5-methyl transferase activity, a cysteinyl tRNA synthetase activity, a hydrolase, an esterase activity, a phosphoesterase activity, an acetylmuramyl pentapeptide phosphotransferase activity, a glycosyltransferase activity, an acetyltransferase activity, an acetylglucosamine phosphate transferase activity, a centromere binding activity, a telomerase activity or a transcriptional regulatory activity, a heat shock protein activity, a protease activity, a proteinase activity, a peptidase activity, a carboxypeptidase activity, an endonuclease activity, an exonuclease activity, a RecB family exonuclease activity, a polymerase activity, a carbamoyl phosphate synthetase activity, a methyl-thioadenine synthetase activity, an oxidoreductase activity, an Fe—S oxidoreductase activity, a flavodoxin reductase activity, a permease activity, a thymidylate activity, a dehydrogenase activity, a pyrophosphorylase activity, a coenzyme metabolism activity, a dinucleotide-utilizing enzyme activity, a molybdopterin or thiamine biosynthesis activity, a beta-lactamase activity, a ligand binding activity, an ion transport activity, an ion metabolism activity, a tellurite resistance protein activity, an inorganic ion transport activity, a nucleotide transport activity, a nucleotide metabolism activity, an actin or myosin activity, a lipase activity or a lipid acyl hydrolase (LAH) activity, a cell envelop biogenesis activity, an outer membrane synthesis activity, a ribosomal structure synthesis activity, a translational processing activity, a transcriptional initiation activity, a TATA-binding activity, a signal transduction activity, an energy metabolism activity, an ATPase activity, an information storage and/or processing activity, and/or any of the polypeptides activities as set forth in Table 3, below.

[0010] In one aspect, the isolated or recombinant nucleic acid encodes a polypeptide having an enzyme, structural or binding activity which is thermostable. The polypeptide can retain an enzyme, structural or binding activity under conditions comprising a temperature range of between about 37° C. to about 95° C.; between about 55° C. to about 85° C., between about 70° C. to about 95° C., or, between about 90° C. to about 95° C., about 96° C., about 97° C., about 98° C., or more. In another aspect, the isolated or recombinant nucleic acid encodes a polypeptide having an enzyme, structural or binding activity which is thermotolerant. The polypeptide can retain an enzyme, structural or binding activity after exposure to a temperature in the range from greater than 37° C. to about 95° C., about 96° C., about 97° C., about 98° C., or more or anywhere in the range from greater than 55° C. to about 85° C. In one aspect, the polypeptide retains an enzyme, structural or binding activity after exposure to a temperature in the range from greater than 90° C. to about 95° C., about 96° C., about 97° C., about 98° C., or more, at about pH 7, pH 6.5, pH 6.0, pH 5.5, pH 5, or pH 4.5.

[0011] The polypeptide can retain an enzyme, structural or binding activity under conditions comprising about pH 7, pH 6.5, pH 6.0, pH 5.5, pH 5, or pH 4.5. The polypeptide can retain an enzyme, structural or binding activity under these conditions comprising a temperature range of between about 40° C. to about 70° C., or, between about 90° C. to about 95° C., or more.

[0012] In one aspect, the isolated or recombinant nucleic acid comprises a sequence that hybridizes under stringent conditions to a sequence of the invention, wherein the nucleic acid encodes a polypeptide having an enzyme, structural or binding activity. The nucleic acid can at least about 10, 20, 30, 40, 50, 60, 70, 80, 90, 100, 150, 200, 250, 300, 350, 400, 450, 500, 550, 600, 650, 700, 750, 800, 850 or residues in length or the full length of the gene or transcript, with or without a signal sequence, or a propro sequence (e.g., as with a protease), as described herein. The stringent conditions can be highly stringent, moderately stringent or of low stringency, as described herein. The stringent conditions can include a wash step, e.g., a wash step comprising a wash in 0.2×SSC at a temperature of about 65° C. for about 15 minutes.

[0013] The invention provides a nucleic acid probe for identifying a nucleic acid encoding a polypeptide, e.g., with an enzyme, structural or binding activity, wherein the probe comprises at least 10, 20, 30, 40, 50, 60, 70, 80, 90, 100, 150, 200, 250, 300, 350, 400, 450, 500, 550, 600, 650, 700, 750, 800, 850, or more, consecutive bases of a sequence of the invention and the probe identifies the nucleic acid by binding or hybridization. The probe can comprise an oligonucleotide comprising at least about 10 to 50, about 20 to 60, about 30 to 70, about 40 to 80, or about 60 to 100 consecutive bases of a sequence of the invention.

[0014] The invention provides a nucleic acid probe for identifying a nucleic acid encoding a polypeptide with an enzyme, structural or binding activity, wherein the probe comprises a nucleic acid of the invention, e.g., a nucleic acid having at least 50%, 51%, 52%, 53%, 54%, 55%, 56%, 57%, 58%, 59%, 60%, 61%, 62%, 63%, 64%, 65%, 66%, 67%, 68%, 69%, 70%, 71%, 72%, 73%, 74%, 75%, 76%, 77%, 78%, 79%, 80%, 81%, 82%, 83%, 84%, 85%, 86%, 87%, 88%, 89%, 90%, 91%, 92%, 93%, 94%, 95%, 96%, 97%, 98%, 99%, or more, or complete (100%) sequence identity to SEQ ID NO:1, SEQ ID NO:2, SEQ ID NO:4, SEQ ID NO:6, SEQ ID NO:8, SEQ ID NO:10, SEQ ID NO:12, SEQ ID NO:14, SEQ ID NO:16, SEQ ID NO:18, SEQ ID NO:20, SEQ ID NO:22, SEQ ID NO:24, SEQ ID NO:26, SEQ ID NO:28, SEQ ID NO:30, SEQ ID NO:32, SEQ ID NO:34, SEQ ID NO:36, SEQ ID NO:38, SEQ ID NO:40, SEQ ID NO:42, SEQ ID NO:44, SEQ ID NO:46, SEQ ID NO:48, SEQ ID NO:50, SEQ ID NO:52, SEQ ID NO:54, SEQ ID NO:56, SEQ ID NO:58, SEQ ID NO:60, SEQ ID NO:62, SEQ ID NO:64, SEQ ID NO:66, SEQ ID NO:68, SEQ ID NO:70, SEQ ID NO:72, SEQ ID NO:74, SEQ ID NO:76, SEQ ID NO:78, SEQ ID NO:80, SEQ ID NO:82, SEQ ID NO:84, SEQ ID NO:86, SEQ ID NO:88, SEQ ID NO:90, SEQ ID NO:92, SEQ ID NO:94, SEQ ID NO:96, SEQ ID NO:98, SEQ ID NO:100, SEQ ID NO:102, SEQ ID NO:104, SEQ ID NO:106, and all additional nucleic acids disclosed in the SEQ ID listing, which include all even numbered SEQ ID NO:s from SEQ ID NO:2 through SEQ ID NO:1073, or a subsequence thereof, over a region of at least about 10, 20, 30, 40, 50, 60, 70, 80, 90, 100, 150, 200, 250, 300, 350, 400, 450, 500, 550, 600, 650, 700, 750, 800, 850 or more consecutive residues, wherein the sequence identities are determined by analysis with a sequence comparison algorithm or by visual inspection.

[0015] The invention provides an amplification primer sequence pair for amplifying a nucleic acid encoding a polypeptide having, e.g., an enzyme, structural or binding activity, wherein the primer pair is capable of amplifying a nucleic acid comprising a sequence of the invention, or fragments or subsequences thereof. One or each member of the amplification primer sequence pair can comprise an oligonucleotide comprising at least about 10 to 50 consecutive bases of the sequence, or about 12, 13, 14, 15, 16, 17, 18, 19, 20, 21, 22, 23, 24, or 25 consecutive bases of the sequence.

[0016] The invention provides amplification primer pairs, wherein the primer pair comprises a first member having a sequence as set forth by about the first (the 5′) 12, 13, 14, 15, 16, 17, 18, 19, 20, 21, 22, 23, 24, or 25 residues of a nucleic acid of the invention, and a second member having a sequence as set forth by about the first (the 5′) 12, 13, 14, 15, 16, 17, 18, 19, 20, 21, 22, 23, 24, or 25 residues of the complementary strand of the first member.

[0017] The invention provides polypeptides generated by amplification, e.g., polymerase chain reaction (PCR), using an amplification primer pair of the invention. The invention provides methods of making a polypeptide by amplification, e.g., polymerase chain reaction (PCR), using an amplification primer pair of the invention. In one aspect, the amplification primer pair amplifies a nucleic acid from a library, e.g., a gene library, such as an environmental library.

[0018] The invention provides methods of amplifying a nucleic acid encoding a polypeptide comprising amplification of a template nucleic acid with an amplification primer sequence pair capable of amplifying a nucleic acid sequence of the invention, or fragments or subsequences thereof. The amplification primer pair can be an amplification primer pair of the invention.

[0019] The invention provides expression cassettes comprising a nucleic acid of the invention or a subsequence thereof. In one aspect, the expression cassette can comprise the nucleic acid that is operably linked to a promoter. The promoter can be a viral, bacterial, mammalian or plant promoter. In one aspect, the plant promoter can be a potato, rice, corn, wheat, tobacco or barley promoter. The promoter can be a constitutive promoter. The constitutive promoter can comprise CaMV35S. In another aspect, the promoter can be an inducible promoter. In one aspect, the promoter can be a tissue-specific promoter or an environmentally regulated or a developmentally regulated promoter. Thus, the promoter can be, e.g., a seed-specific, a leaf-specific, a root-specific, a stem-specific or an abscission-induced promoter. In one aspect, the expression cassette can further comprise a plant or plant virus expression vector.

[0020] The invention provides cloning vehicles comprising an expression cassette (e.g., a vector) of the invention or a nucleic acid of the invention. The cloning vehicle can be a viral vector, a plasmid, a phage, a phagemid, a cosmid, a fosmid, a bacteriophage or an artificial chromosome. The viral vector can comprise an adenovirus vector, a retroviral vector or an adeno-associated viral vector. The cloning vehicle can comprise a bacterial artificial chromosome (BAC), a plasmid, a bacteriophage P1-derived vector (PAC), a yeast artificial chromosome (YAC), or a mammalian artificial chromosome (MAC).

[0021] The invention provides transformed cell comprising a nucleic acid of the invention or an expression cassette (e.g., a vector) of the invention, or a cloning vehicle of the invention. In one aspect, the transformed cell can be a bacterial cell, a mammalian cell, a fungal cell, a yeast cell, an insect cell or a plant cell. In one aspect, the plant cell can be a potato, wheat, rice, corn, tobacco or barley cell.

[0022] The invention provides transgenic non-human animals comprising a nucleic acid of the invention or an expression cassette (e.g., a vector) of the invention. In one aspect, the animal is a mouse.

[0023] The invention provides transgenic plants comprising a nucleic acid of the invention or an expression cassette (e.g., a vector) of the invention. The transgenic plant can be a corn plant, a potato plant, a tomato plant, a wheat plant, an oilseed plant, a rapeseed plant, a soybean plant, a rice plant, a barley plant or a tobacco plant. The invention provides transgenic seeds comprising a nucleic acid of the invention or an expression cassette (e.g., a vector) of the invention. The transgenic seed can be a corn seed, a wheat kernel, an oilseed, a rapeseed (a canola plant), a soybean seed, a palm kernel, a sunflower seed, a sesame seed, a peanut or a tobacco plant seed.

[0024] The invention provides an antisense oligonucleotide comprising a nucleic acid sequence complementary to or capable of hybridizing under stringent conditions to a nucleic acid of the invention. The invention provides methods of inhibiting the translation of a polypeptide message in a cell comprising administering to the cell or expressing in the cell an antisense oligonucleotide comprising a nucleic acid sequence complementary to or capable of hybridizing under stringent conditions to a nucleic acid of the invention.

[0025] The invention provides an antisense oligonucleotide comprising a nucleic acid sequence complementary to or capable of hybridizing under stringent conditions to a nucleic acid of the invention. The invention provides methods of inhibiting the translation of a polypeptide message in a cell comprising administering to the cell or expressing in the cell an antisense oligonucleotide comprising a nucleic acid sequence complementary to or capable of hybridizing under stringent conditions to a nucleic acid of the invention. The antisense oligonucleotide can be between about 10 to 50, about 20 to 60, about 30 to 70, about 40 to 80, about 60 to 100, about 70 to 110, or about 80 to 120 bases in length.

[0026] The invention provides methods of inhibiting the translation of message in a cell comprising administering to the cell or expressing in the cell an antisense oligonucleotide comprising a nucleic acid sequence complementary to or capable of hybridizing under stringent conditions to a nucleic acid of the invention. The invention provides double-stranded inhibitory RNA (RNAi) molecules comprising a subsequence of a sequence of the invention. In one aspect, the RNAi is about 15, 16, 17, 18, 19, 20, 21, 22, 23, 24, 25 or more duplex nucleotides in length. The invention provides methods of inhibiting the expression of a message in a cell comprising administering to the cell or expressing in the cell a double-stranded inhibitory RNA (iRNA), wherein the RNA comprises a subsequence of a sequence of the invention.

[0027] The invention provides isolated or recombinant polypeptides encoded by a nucleic acid of the invention. In alternative aspects, the polypeptide can have a sequence as set forth in SEQ ID NO:3, SEQ ID NO:5, SEQ ID NO:7, SEQ ID NO:9, SEQ ID NO:11, SEQ ID NO:13, SEQ ID NO:15, SEQ ID NO:17, SEQ ID NO:19, SEQ ID NO:21, SEQ ID NO:23, SEQ ID NO:25, SEQ ID NO:27, SEQ ID NO:29, SEQ ID NO:31, SEQ ID NO:33, SEQ ID NO:35, SEQ ID NO:37, SEQ ID NO:39, SEQ ID NO:41, SEQ ID NO:43, SEQ ID NO:45, SEQ ID NO:47, SEQ ID NO:49, SEQ ID NO:51, SEQ ID NO:53, SEQ ID NO:55, SEQ ID NO:57, SEQ ID NO:59, SEQ ID NO:61, SEQ ID NO:63, SEQ ID NO:65, SEQ ID NO:67, SEQ ID NO:69, SEQ ID NO:71, SEQ ID NO:73, SEQ ID NO:75, SEQ ID NO:77, SEQ ID NO:79, SEQ ID NO:81, SEQ ID NO:83, SEQ ID NO:85, SEQ ID NO:87, SEQ ID NO:89, SEQ ID NO:91, SEQ ID NO:93, SEQ ID NO:95, SEQ ID NO:97, SEQ ID NO:99, SEQ ID NO:101, SEQ ID NO:103, SEQ ID NO:105, and all polypeptides disclosed in the SEQ ID listing, which include all odd numbered SEQ ID NO:s from SEQ ID NO:3 through SEQ ID NO:1073. The polypeptide can have an enzyme, structural or binding activity.

[0028] In alternative aspects, the enzyme, structural or binding activity comprises a recombinase activity, a helicase activity, a DNA replication activity, a DNA recombination activity, an isomerase, a transisomerase activity or topoisomerase activity, a methyl transferase activity, an aminotransferase activity, a uracil-5-methyl transferase activity, a cysteinyl tRNA synthetase activity, a hydrolase, an esterase activity, a phosphoesterase activity, an acetylmuramyl pentapeptide phosphotransferase activity, a glycosyltransferase activity, an acetyltransferase activity, an acetylglucosamine phosphate transferase activity, a centromere binding activity, a telomerase activity or a transcriptional regulatory activity, a heat shock protein activity, a protease activity, a proteinase activity, a peptidase activity, a carboxypeptidase activity, an endonuclease activity, an exonuclease activity, a RecB family exonuclease activity, a polymerase activity, a carbamoyl phosphate synthetase activity, a methyl-thioadenine synthetase activity, an oxidoreductase activity, an Fe—S oxidoreductase activity, a flavodoxin reductase activity, a permease activity, a thymidylate activity, a dehydrogenase activity, a pyrophosphorylase activity, a coenzyme metabolism activity, a dinucleotide-utilizing enzyme activity, a molybdopterin or thiamine biosynthesis activity, a beta-lactamase activity, a ligand binding activity, an ion transport activity, an ion metabolism activity, a tellurite resistance protein activity, an inorganic ion transport activity, a nucleotide transport activity, a nucleotide metabolism activity, an actin or myosin activity, a lipase activity or a lipid acyl hydrolase (LAH) activity, a cell envelop biogenesis activity, an outer membrane synthesis activity, a ribosomal structure synthesis activity, a translational processing activity, a transcriptional initiation activity, a TATA-binding activity, a signal transduction activity, an energy metabolism activity, an ATPase activity, an information storage and/or processing activity, and/or any of the polypeptides activities as set forth in Table 3, below.

[0029] The invention provides isolated or recombinant polypeptides comprising a polypeptide of the invention lacking a signal sequence and/or a prepro sequence.

[0030] Another aspect of the invention provides an isolated or recombinant polypeptide or peptide including at least 10, 15, 20, 25, 30, 35, 40, 45, 50, 55, 60, 65, 70, 75, 80, 85, 90, 95 or 100 or more consecutive bases of a polypeptide or peptide sequence of the invention, sequences substantially identical thereto, and the sequences complementary thereto. The peptide can be, e.g., an immunogenic fragment, a motif (e.g., a binding site) or an active site.

[0031] In one aspect, the isolated or recombinant polypeptide of the invention (with or without a signal sequence or a prepro sequence) has an enzyme, structural or binding activity.

[0032] In one aspect, the enzyme, structural or binding activity is thermostable. The polypeptide can retain an enzyme, structural or binding activity under conditions comprising a temperature range of between about 37° C. to about 95° C., between about 55° C. to about 85° C., between about 70° C. to about 95° C., or between about 90° C. to about 95° C. In another aspect, the enzyme, structural or binding activity can be thermotolerant. The polypeptide can retain an enzyme, structural or binding activity after exposure to a temperature in the range from greater than 37° C. to about 95° C., or in the range from greater than 55° C. to about 85° C. In one aspect, the polypeptide can retain an enzyme, structural or binding activity after exposure to a temperature in the range from greater than 90° C. to about 95° C. at pH 4.5.

[0033] In one aspect, the polypeptide can retain an enzyme, structural or binding activity under conditions comprising about pH 6.5, pH 6, pH 5.5, pH 5, pH 4.5 or pH 4. In another aspect, the polypeptide can retain an enzyme, structural or binding activity under conditions comprising about pH 7, pH 7.5 pH 8.0, pH 8.5, pH 9, pH 9.5, pH 10, pH 10.5 or pH 11.

[0034] In one aspect, the isolated or recombinant polypeptide can comprise the polypeptide of the invention that lacks a signal sequence and/or a prepro domain. In one aspect, the isolated or recombinant polypeptide can comprise the polypeptide of the invention comprising a heterologous signal sequence or a heterologous preprosequence, such as a heterologous enzyme or non-enzyme signal sequence.

[0035] The invention provides isolated or recombinant peptides comprising an amino acid sequence having at least 95%, 96%, 97%, 98%, 99%, or more sequence identity to a signal sequence and/or a prepro sequence of the invention, wherein the sequence identities are determined by analysis with a sequence comparison algorithm or by visual inspection. In one aspect, the peptides act as signal sequences on its endogenous polypeptide, on another enzyme, or a heterologous protein. In one aspect, the invention provides chimeric proteins comprising a first domain comprising a signal sequence of the invention and at least a second domain. The protein can be a fusion protein. The second domain can comprise an enzyme.

[0036] The invention provides chimeric polypeptides comprising at least a first domain comprising signal peptide (SP) and/or a prepro sequence of the invention or a catalytic domain (CD), or active site, of an enzyme of the invention and at least a second domain comprising a heterologous polypeptide or peptide, wherein the heterologous polypeptide or peptide is not naturally associated with the signal peptide (SP), prepro sequence or catalytic domain (CD). In one aspect, the heterologous polypeptide or peptide is not an enzyme. The heterologous polypeptide or peptide can be amino terminal to, carboxy terminal to or on both ends of the signal peptide (SP), prepro sequence or catalytic domain.

[0037] The invention provides isolated or recombinant nucleic acids encoding a chimeric polypeptide, wherein the chimeric polypeptide comprises at least a first domain comprising signal peptide (SP), prepro sequence or a catalytic domain (CD), or active site, of a polypeptide of the invention, and at least a second domain comprising a heterologous polypeptide or peptide, wherein the heterologous polypeptide or peptide is not naturally associated with the signal peptide (SP), prepro sequence or catalytic domain (CD).

[0038] In one aspect, the enzyme, structural or binding activity comprises a specific activity at about 37° C. in the range from about 1 to about 1000 units, or about 10 to 100 units per milligram of protein. In another aspect, the enzyme, structural or binding activity comprises a specific activity from about 500 to about 750 units per milligram of protein. Alternatively, the enzyme, structural or binding activity comprises a specific activity at 37° C. in the range from about 1 to 1000, or about 500 to about 1200 units per milligram of protein. In one aspect, the enzyme, structural or binding activity comprises a specific activity at 37° C. in the range from about 750 to about 1000 units per milligram of protein. In another aspect, the thermotolerance comprises retention of at least half of the specific activity of the enzyme, structural or binding at 37° C. after being heated to the elevated temperature. Alternatively, the thermotolerance can comprise retention of specific activity at 37° C. in the range from about 500 to about 1200 units per milligram of protein after being heated to the elevated temperature.

[0039] The invention provides the isolated or recombinant polypeptide of the invention, wherein the polypeptide comprises at least one glycosylation site. In one aspect, glycosylation can be an N-linked glycosylation. In one aspect, the polypeptide can be glycosylated after being expressed in a P. pastoris or a S. pombe.

[0040] The invention provides protein preparations comprising a polypeptide of the invention, wherein the protein preparation comprises a liquid, a solid or a gel.

[0041] The invention provides heterodimers comprising a polypeptide of the invention and a second protein or domain. The second member of the heterodimer can be a different enzyme, a different enzyme or another protein. In one aspect, the second domain can be a polypeptide and the heterodimer can be a fusion protein. In one aspect, the second domain can be an epitope or a tag. In one aspect, the invention provides homodimers comprising a polypeptide of the invention.

[0042] The invention provides immobilized polypeptides having an enzyme, structural or binding activity, wherein the polypeptide comprises a polypeptide of the invention, a polypeptide encoded by a nucleic acid of the invention, or a polypeptide comprising a polypeptide of the invention and a second domain. In one aspect, the polypeptide can be immobilized on a cell, a metal, a resin, a polymer, a ceramic, a glass, a microelectrode, a graphitic particle, a bead, a gel, a plate, an array or a capillary tube.

[0043] The invention provides arrays comprising an immobilized polypeptide of the invention or a polypeptide encoded by a nucleic acid of the invention. The invention provides arrays comprising an immobilized nucleic acid of the invention. The invention provides an array comprising an immobilized antibody of the invention.

[0044] The invention provides isolated or recombinant antibodies that specifically bind to a polypeptide of the invention or to a polypeptide encoded by a nucleic acid of the invention. The antibody can be a monoclonal or a polyclonal antibody. The invention provides hybridomas comprising an antibody of the invention.

[0045] The invention provides methods of isolating or identifying a polypeptide with an enzyme, structural or binding activity comprising the steps of: (a) providing an antibody of the invention; (b) providing a sample comprising polypeptides; and, (c) contacting the sample of step (b) with the antibody of step (a) under conditions wherein the antibody can specifically bind to the polypeptide, thereby isolating or identifying polypeptide. The invention provides methods of making an antibody comprising administering to a non-human animal a nucleic acid of the invention, or a polypeptide of the invention, in an amount sufficient to generate a humoral immune response, thereby making an antibody.

[0046] The invention provides methods of producing a recombinant polypeptide comprising the steps of: (a) providing a nucleic acid of the invention operably linked to a promoter; and, (b) expressing the nucleic acid of step (a) under conditions that allow expression of the polypeptide, thereby producing a recombinant polypeptide. The method can further comprise transforming a host cell with the nucleic acid of step (a) followed by expressing the nucleic acid of step (a), thereby producing a recombinant polypeptide in a transformed cell. The method can further comprise inserting into a host non-human animal the nucleic acid of step (a) followed by expressing the nucleic acid of step (a), thereby producing a recombinant polypeptide in the host non-human animal.

[0047] The invention provides methods for identifying a polypeptide having an enzyme activity comprising the following steps: (a) providing a polypeptide of the invention or a polypeptide encoded by a nucleic acid of the invention, or a fragment or variant thereof, (b) providing an enzyme substrate; and, (c) contacting the polypeptide or a fragment or variant thereof of step (a) with the substrate of step (b) and detecting an increase in the amount of substrate or a decrease in the amount of reaction product, wherein a decrease in the amount of the substrate or an increase in the amount of the reaction product detects a polypeptide having an enzyme activity.

[0048] The invention provides methods for identifying an enzyme substrate comprising the following steps: (a) providing a polypeptide of the invention or a polypeptide encoded by a nucleic acid of the invention; (b) providing a test substrate; and, (c) contacting the polypeptide of step (a) with the test substrate of step (b) and detecting an increase in the amount of substrate or a decrease in the amount of reaction product, wherein a decrease in the amount of the substrate or an increase in the amount of the reaction product identifies the test substrate as an enzyme substrate.

[0049] The invention provides methods of determining whether a compound specifically binds to a polypeptide comprising the following steps: (a) expressing a nucleic acid or a vector comprising the nucleic acid under conditions permissive for translation of the nucleic acid to a polypeptide, wherein the nucleic acid and vector comprise a nucleic acid or vector of the invention; or, providing a polypeptide of the invention (b) contacting the polypeptide with the test compound; and, (c) determining whether the test compound specifically binds to the polypeptide, thereby determining that the compound specifically binds to the polypeptide.

[0050] The invention provides methods for identifying a modulator of a polypeptide activity comprising the following steps: (a) providing a polypeptide of the invention or a polypeptide encoded by a nucleic acid of the invention; (b) providing a test compound; (c) contacting the polypeptide of step (a) with the test compound of step (b); and, measuring an activity of the polypeptide, wherein a change in the polypeptide activity measured in the presence of the test compound compared to the activity in the absence of the test compound provides a determination that the test compound modulates the polypeptide activity.

[0051] In one aspect, the enzyme activity is measured by providing an enzyme substrate and detecting an increase in the amount of the substrate or a decrease in the amount of a reaction product. The decrease in the amount of the substrate or the increase in the amount of the reaction product with the test compound as compared to the amount of substrate or reaction product without the test compound identifies the test compound as an activator of enzyme activity. The increase in the amount of the substrate or the decrease in the amount of the reaction product with the test compound as compared to the amount of substrate or reaction product without the test compound identifies the test compound as an inhibitor of enzyme activity.

[0052] The invention provides computer systems comprising a processor and a data storage device wherein said data storage device has stored thereon a polypeptide sequence of the invention or a nucleic acid sequence of the invention.

[0053] In one aspect, the computer system can further comprise a sequence comparison algorithm and a data storage device having at least one reference sequence stored thereon. The sequence comparison algorithm can comprise a computer program that indicates polymorphisms. The computer system can further comprising an identifier that identifies one or more features in said sequence.

[0054] The invention provides computer readable mediums having stored thereon a sequence comprising a polypeptide sequence of the invention or a nucleic acid sequence of the invention.

[0055] The invention provides methods for identifying a feature in a sequence comprising the steps of: (a) reading the sequence using a computer program which identifies one or more features in a sequence, wherein the sequence comprises a polypeptide sequence of the invention or a nucleic acid sequence of the invention; and, (b) identifying one or more features in the sequence with the computer program.

[0056] The invention provides methods for comparing a first sequence to a second sequence comprising the steps of: (a) reading the first sequence and the second sequence through use of a computer program which compares sequences, wherein the first sequence comprises a polypeptide sequence of the invention or a nucleic acid sequence of the invention; and, (b) determining differences between the first sequence and the second sequence with the computer program. In one aspect, the step of determining differences between the first sequence and the second sequence further comprises the step of identifying polymorphisms. In one aspect, the method further comprises an identifier (and use of the identifier) that identifies one or more features in a sequence. In one aspect, the method comprises reading the first sequence using a computer program and identifying one or more features in the sequence.

[0057] The invention provides methods for isolating or recovering a nucleic acid encoding a polypeptide with an activity, e.g., an enzyme, structural or transcriptional control activity, from an environmental sample comprising the steps of: (a) providing an amplification primer sequence pair for amplifying a nucleic acid encoding a polypeptide with an activity, wherein the primer pair is capable of amplifying a nucleic acid of the invention; (b) isolating a nucleic acid from the environmental sample or treating the environmental sample such that nucleic acid in the sample is accessible for hybridization to the amplification primer pair; and, (c) combining the nucleic acid of step (b) with the amplification primer pair of step (a) and amplifying nucleic acid from the environmental sample, thereby isolating or recovering a nucleic acid encoding a polypeptide with an activity from an environmental sample. In one aspect, each member of the amplification primer sequence pair comprises an oligonucleotide comprising at least about 10 to 50 consecutive bases of a nucleic acid sequence of the invention. In one aspect, the amplification primer sequence pair is an amplification pair of the invention.

[0058] The invention provides methods for isolating or recovering a nucleic acid encoding a polypeptide with an activity, e.g., an enzyme, structural or transcriptional control activity, from an environmental sample comprising the steps of: (a) providing a polynucleotide probe comprising a nucleic acid sequence of the invention, or a subsequence thereof; (b) isolating a nucleic acid from the environmental sample or treating the environmental sample such that nucleic acid in the sample is accessible for hybridization to a polynucleotide probe of step (a); (c) combining the isolated nucleic acid or the treated environmental sample of step (b) with the polynucleotide probe of step (a); and, (d) isolating a nucleic acid that specifically hybridizes with the polynucleotide probe of step (a), thereby isolating or recovering a nucleic acid encoding a polypeptide with an activity from the environmental sample. In alternative aspects, the environmental sample comprises a water sample, a liquid sample, a soil sample, an air sample or a biological sample. In alternative aspects, the biological sample is derived from a bacterial cell, a protozoan cell, an insect cell, a yeast cell, a plant cell, a fungal cell or a mammalian cell.

[0059] The invention provides methods of generating a variant of a nucleic acid encoding a polypeptide comprising the steps of: (a) providing a template nucleic acid comprising a nucleic acid of the invention; (b) modifying, deleting or adding one or more nucleotides in the template sequence, or a combination thereof, to generate a variant of the template nucleic acid. In one aspect, the method further comprises expressing the variant nucleic acid to generate a variant polypeptide. In alternative aspects, the modifications, additions or deletions are introduced by error-prone PCR, shuffling, oligonucleotide-directed mutagenesis, assembly PCR, sexual PCR mutagenesis, in vivo mutagenesis, cassette mutagenesis, recursive ensemble mutagenesis, exponential ensemble mutagenesis, site-specific mutagenesis, gene reassembly, gene site saturated mutagenesis (GSSM), synthetic ligation reassembly (SLR) and/or a combination thereof. In alternative aspects, the modifications, additions or deletions are introduced by a method selected from the group consisting of recombination, recursive sequence recombination, phosphothioate-modified DNA mutagenesis, uracil-containing template mutagenesis, gapped duplex mutagenesis, point mismatch repair mutagenesis, repair-deficient host strain mutagenesis, chemical mutagenesis, radiogenic mutagenesis, deletion mutagenesis, restriction-selection mutagenesis, restriction-purification mutagenesis, artificial gene synthesis, ensemble mutagenesis, chimeric nucleic acid multimer creation and/or a combination thereof.

[0060] In one aspect, the method is iteratively repeated until a polypeptide (e.g., an enzyme) having an altered or different activity or an altered or different stability from that of a polypeptide encoded by the template nucleic acid is produced. In one aspect, the altered or different activity is a polypeptide (e.g., an enzyme) activity under an acidic condition, wherein the polypeptide encoded by the template nucleic acid is not active under the acidic condition. In one aspect, the altered or different activity is a polypeptide (e.g., an enzyme) activity under a high temperature, wherein the polypeptide encoded by the template nucleic acid is not active under the high temperature. In one aspect, the method is iteratively repeated until a polypeptide coding sequence having an altered codon usage from that of the template nucleic acid is produced. The method can be iteratively repeated until a gene having higher or lower level of message expression or stability from that of the template nucleic acid is produced.

[0061] The invention provides methods for modifying codons in a nucleic acid encoding an enzyme to increase its expression in a host cell, the method comprising (a) providing a nucleic acid of the invention encoding an enzyme; and, (b) identifying a non-preferred or a less preferred codon in the nucleic acid of step (a) and replacing it with a preferred or neutrally used codon encoding the same amino acid as the replaced codon, wherein a preferred codon is a codon over-represented in coding sequences in genes in the host cell and a non-preferred or less preferred codon is a codon under-represented in coding sequences in genes in the host cell, thereby modifying the nucleic acid to increase its expression in a host cell.

[0062] The invention provides methods for modifying codons in a nucleic acid encoding an enzyme, the method comprising (a) providing a nucleic acid of the invention encoding an enzyme; and, (b) identifying a codon in the nucleic acid of step (a) and replacing it with a different codon encoding the same amino acid as the replaced codon, thereby modifying codons in a nucleic acid encoding an enzyme.

[0063] The invention provides methods for modifying codons in a nucleic acid encoding an enzyme to increase its expression in a host cell, the method comprising (a) providing a nucleic acid of the invention encoding an enzyme; and, (b) identifying a non-preferred or a less preferred codon in the nucleic acid of step (a) and replacing it with a preferred or neutrally used codon encoding the same amino acid as the replaced codon, wherein a preferred codon is a codon over-represented in coding sequences in genes in the host cell and a non-preferred or less preferred codon is a codon under-represented in coding sequences in genes in the host cell, thereby modifying the nucleic acid to increase its expression in a host cell.

[0064] The invention provides methods for modifying a codon in a nucleic acid encoding an enzyme to decrease its expression in a host cell, the method comprising (a) providing a nucleic acid of the invention encoding an enzyme; and, (b) identifying at least one preferred codon in the nucleic acid of step (a) and replacing it with a non-preferred or less preferred codon encoding the same amino acid as the replaced codon, wherein a preferred codon is a codon over-represented in coding sequences in genes in a host cell and a non-preferred or less preferred codon is a codon under-represented in coding sequences in genes in the host cell, thereby modifying the nucleic acid to decrease its expression in a host cell. In alternative aspects, the host cell is a bacterial cell, a fungal cell, an insect cell, a yeast cell, a plant cell or a mammalian cell.

[0065] The invention provides methods for producing a library of nucleic acids encoding a plurality of modified enzyme active sites or substrate binding sites, wherein the modified active sites or substrate binding sites are derived from a first nucleic acid comprising a sequence encoding a first active site or a first substrate binding site the method comprising: (a) providing a first nucleic acid encoding a first active site or first substrate binding site, wherein the first nucleic acid sequence comprises a nucleic acid of the invention; (b) providing a set of mutagenic oligonucleotides that encode naturally-occurring amino acid variants at a plurality of targeted codons in the first nucleic acid; and, (c) using the set of mutagenic oligonucleotides to generate a set of active site-encoding or substrate binding site-encoding variant nucleic acids encoding a range of amino acid variations at each amino acid codon that was mutagenized, thereby producing a library of nucleic acids encoding a plurality of modified enzyme active sites or substrate binding sites. In alternative aspects, the method comprises mutagenizing the first nucleic acid of step (a) by a method comprising an optimized directed evolution system, gene site-saturation mutagenesis (GSSM), and synthetic ligation reassembly (SLR). The method can further comprise mutagenizing the first nucleic acid of step (a) or variants by a method comprising error-prone PCR, shuffling, oligonucleotide-directed mutagenesis, assembly PCR, sexual PCR mutagenesis, in vivo mutagenesis, cassette mutagenesis, recursive ensemble mutagenesis, exponential ensemble mutagenesis, site-specific mutagenesis, gene reassembly, gene site saturated mutagenesis (GSSM), synthetic ligation reassembly (SLR) and a combination thereof. The method can further comprise mutagenizing the first nucleic acid of step (a) or variants by a method comprising recombination, recursive sequence recombination, phosphothioate-modified DNA mutagenesis, uracil-containing template mutagenesis, gapped duplex mutagenesis, point mismatch repair mutagenesis, repair-deficient host strain mutagenesis, chemical mutagenesis, radiogenic mutagenesis, deletion mutagenesis, restriction-selection mutagenesis, restriction-purification mutagenesis, artificial gene synthesis, ensemble mutagenesis, chimeric nucleic acid multimer creation and a combination thereof.

[0066] The invention provides methods for making a small molecule comprising the steps of: (a) providing a plurality of biosynthetic enzymes capable of synthesizing or modifying a small molecule, wherein one of the enzymes comprises an enzyme encoded by a nucleic acid of the invention; (b) providing a substrate for at least one of the enzymes of step (a); and, (c) reacting the substrate of step (b) with the enzymes under conditions that facilitate a plurality of biocatalytic reactions to generate a small molecule by a series of biocatalytic reactions.

[0067] The invention provides methods for modifying a small molecule comprising the steps: (a) providing a enzyme encoded by a nucleic acid of the invention; (b) providing a small molecule; and, (c) reacting the enzyme of step (a) with the small molecule of step (b) under conditions that facilitate an enzymatic reaction catalyzed by the enzyme, thereby modifying a small molecule by an enzymatic reaction. In one aspect, the method comprises providing a plurality of small molecule substrates for the enzyme of step (a), thereby generating a library of modified small molecules produced by at least one enzymatic reaction catalyzed by the enzyme. In one aspect, the method further comprises a plurality of additional enzymes under conditions that facilitate a plurality of biocatalytic reactions by the enzymes to form a library of modified small molecules produced by the plurality of enzymatic reactions. In one aspect, the method further comprises the step of testing the library to determine if a particular modified small molecule that exhibits a desired activity is present within the library. The step of testing the library can further comprises the steps of systematically eliminating all but one of the biocatalytic reactions used to produce a portion of the plurality of the modified small molecules within the library by testing the portion of the modified small molecule for the presence or absence of the particular modified small molecule with a desired activity, and identifying at least one specific biocatalytic reaction that produces the particular modified small molecule of desired activity.

[0068] The invention provides methods for determining a functional fragment of an enzyme comprising the steps of: (a) providing an enzyme comprising an amino acid sequence of the invention; and, (b) deleting a plurality of amino acid residues from the sequence of step (a) and testing the remaining subsequence for an enzyme activity, thereby determining a functional fragment of an enzyme. In one aspect, the enzyme activity is measured by providing an enzyme substrate and detecting an increase in the amount of the substrate or a decrease in the amount of a reaction product. In one aspect, a decrease in the amount of an enzyme substrate or an increase in the amount of the reaction product with the test compound as compared to the amount of substrate or reaction product without the test compound identifies the test compound as an activator of enzyme activity.

[0069] The invention provides methods for whole cell engineering of new or modified phenotypes by using real-time metabolic flux analysis, the method comprising the following steps: (a) making a modified cell by modifying the genetic composition of a cell, wherein the genetic composition is modified by addition to the cell of a nucleic acid comprising a sequence of the invention; (b) culturing the modified cell to generate a plurality of modified cells; (c) measuring at least one metabolic parameter of the cell by monitoring the cell culture of step (b) in real time; and, (d) analyzing the data of step (c) to determine if the measured parameter differs from a comparable measurement in an unmodified cell under similar conditions, thereby identifying an engineered phenotype in the cell using real-time metabolic flux analysis. In one aspect, the genetic composition of the cell is modified by a method comprising deletion of a sequence or modification of a sequence in the cell, or, knocking out the expression of a gene. The method can further comprise selecting a cell comprising a newly engineered phenotype. The method can further comprise culturing the selected cell, thereby generating a new cell strain comprising a newly engineered phenotype.

[0070] The invention provides isolated or recombinant signal sequences consisting of a sequence as set forth in residues 1 to 16, 1 to 17, 1 to 18, 1 to 19, 1 to 20, 1 to 21, 1 to 22, 1 to 23, 1 to 24, 1 to 25, 1 to 26, 1 to 27, 1 to 28, 1 to 28, 1 to 30 or 1 to 31, 1 to 32, 1 to 33, 1 to 34, 1 to 35, 1 to 36, 1 to 37, 1 to 38, 1 to 39, 1 to 40, 1 to 41, 1 to 42, 1 to 43, 1 to 44, 1 to 45, 1 to 46, 1 to 47, 1 to 48, 1 to 49, 1 to 50, 1 to 51, 1 to 52, 1 to 53, 1 to 54, 1 to 55, of SEQ ID NO:3, SEQ ID NO:5, SEQ ID NO:7, SEQ ID NO:9, SEQ ID NO:11, SEQ ID NO:13, SEQ ID NO:15, SEQ ID NO:17, SEQ ID NO:19, SEQ ID NO:21, SEQ ID NO:23, SEQ ID NO:25, SEQ ID NO:27, SEQ ID NO:29, SEQ ID NO:31, SEQ ID NO:33, SEQ ID NO:35, SEQ ID NO:37, SEQ ID NO:39, SEQ ID NO:41, SEQ ID NO:43, SEQ ID NO:45, SEQ ID NO:47, SEQ ID NO:49, SEQ ID NO:51, SEQ ID NO:53, SEQ ID NO:55, SEQ ID NO:57, SEQ ID NO:59, SEQ ID NO:61, SEQ ID NO:63, SEQ ID NO:65, SEQ ID NO:67, SEQ ID NO:69, SEQ ID NO:71, SEQ ID NO:73, SEQ ID NO:75, SEQ ID NO:77, SEQ ID NO:79, SEQ ID NO:81, SEQ ID NO:83, SEQ ID NO:85, SEQ ID NO:87, SEQ ID NO:89, SEQ ID NO:91, SEQ ID NO:93, SEQ ID NO:95, SEQ ID NO:97, SEQ ID NO:99, SEQ ID NO:101, SEQ ID NO:103, SEQ ID NO:105, and all polypeptides disclosed in the SEQ ID listing, which include all odd numbered SEQ ID NO:s from SEQ ID NO:3 through SEQ ID NO:1073. The invention provides chimeric polypeptides comprising at least a first domain comprising signal peptide (SP) of the invention, and at least a second domain comprising a heterologous polypeptide or peptide, wherein the heterologous polypeptide or peptide is not naturally associated with the signal peptide (SP). In one aspect, the heterologous polypeptide or peptide is not an enzyme. In one aspect, the heterologous polypeptide or peptide is amino terminal to, carboxy terminal to or on both ends of the signal peptide (SP) or a catalytic domain (CD). The invention provides isolated or recombinant nucleic acids encoding a chimeric polypeptide, wherein the chimeric polypeptide comprises at least a first domain comprising signal peptide of the invention and at least a second domain comprising a heterologous polypeptide or peptide, wherein the heterologous polypeptide or peptide is not naturally associated with the signal peptide (SP).

[0071] The invention provides methods of increasing thermotolerance or thermostability of an enzyme polypeptide, the method comprising glycosylating an enzyme, wherein the polypeptide comprises at least thirty contiguous amino acids of a polypeptide of the invention, or a polypeptide encoded by a nucleic acid of the invention, thereby increasing the thermotolerance or thermostability of the enzyme. The invention provides methods of overexpressing a recombinant enzyme in a cell comprising expressing a vector comprising a nucleic acid sequence of the invention, wherein overexpression is effected by use of a high activity promoter, a dicistronic vector or by gene amplification of the vector.

[0072] The invention provides methods of making a transgenic plant comprising the following steps: (a) introducing a heterologous nucleic acid sequence into the cell, wherein the heterologous nucleic sequence comprises a sequence of the invention, thereby producing a transformed plant cell; (b) producing a transgenic plant from the transformed cell. In one aspect, step (a) further comprises introducing the heterologous nucleic acid sequence by electroporation or microinjection of plant cell protoplasts. In one aspect, step (a) step (a) comprises introducing the heterologous nucleic acid sequence directly to plant tissue by DNA particle bombardment or by using an Agrobacterium tumefaciens host.

[0073] The invention provides methods of expressing a heterologous nucleic acid sequence in a plant cell comprising the following steps: (a) transforming the plant cell with a heterologous nucleic acid sequence operably linked to a promoter, wherein the heterologous nucleic sequence comprises a sequence of the invention; (b) growing the plant under conditions wherein the heterologous nucleic acids sequence is expressed in the plant cell.

[0074] The invention provides methods for a building a genome having a desired biological requirement, a desired biological property or a desired metabolic pathway comprising the following steps: (a) providing a minimal autonomous genome, wherein the genome comprises a sequence as set forth in SEQ ID NO:1; and (b) adding back to the minimal autonomous genome of step (a) one or more desired genes, thereby building a genome having a desired biological requirement, a desired biological property or a desired metabolic pathway. In one aspect the desired biological property comprises performing a metabolic function, synthesizing a structure or composition or regulating a cell cycle.

[0075] The invention provides methods for a building a minimal autonomous genome comprising the following steps: (a) providing a genome comprising a sequence as set forth in SEQ ID NO:1; and (b) performing global knockout mutagenesis on the genome, or adding genes to the genome, and determining whether a cell comprising the genome can survive or replicate autonomously, thereby building an autonomous minimal genome.

[0076] The details of one or more embodiments of the invention are set forth in the accompanying drawings and the description below. Other features, objects, and advantages of the invention will be apparent from the description and drawings, and from the claims.

[0077] All publications, patents, patent applications, GenBank sequences and ATCC deposits, cited herein are hereby expressly incorporated by reference for all purposes.

### BRIEF DESCRIPTION OF THE DRAWINGS

[0078] The following drawings are illustrative of embodiments of the invention and are not meant to limit the scope of the invention as encompassed by the claims.

[0079] FIG. 1 is a block diagram of a computer system, as described in detail, below.

[0080] FIG. 2 is a flow diagram illustrating one aspect of a process 200 for comparing a new nucleotide or protein sequence with a database of sequences in order to determine the homology levels between the new sequence and the sequences in the database, as described in detail, below.

[0081] FIG. 3 is a flow diagram illustrating one embodiment of a process in a computer for determining whether two sequences are homologous, as described in detail, below.

[0082] FIG. 4 is a flow diagram illustrating one aspect of an identifier process 300 for detecting the presence of a feature in a sequence.

[0083] FIG. 5, summarizes data from the alanylation of unfractionated M. jannaschii tRNA by alanyl-tRNA synthetase, as described in detail, below.

[0084] FIG. 6 schematically illustrates the phylogenetic position of Nanoarchaeum equitans within the Archaea, as described in detail, below.

[0085] Like reference symbols in the various drawings indicate like elements.

### DETAILED DESCRIPTION OF THE INVENTION

[0086] The invention provides an isolated and a recombinant genome of a hyperthermophile Nanoarchaeum equitans (SEQ ID NO:1). The invention also provides an isolated hyperthermophile Nanoarchaeum equitans deposited as ATCC accession no. ______. N. equitans is an obligate parasite growing on the crenarchaeon Ignicoccus. A ribosomal protein based phylogenetic analysis places its branching point closest to the root of the archaeal tree.

[0087] The invention also provides isolated and recombinant nucleic acids encoding polypeptides, e.g., SEQ ID NO:2, SEQ ID NO:4, SEQ ID NO:6, SEQ ID NO:8, SEQ ID NO: 10, etc., and all additional nucleic acids disclosed in the SEQ ID listing, which include all even numbered SEQ ID NO:s from SEQ ID NO:2 through SEQ ID NO:1073. The invention also provides isolated and recombinant polypeptides, SEQ ID NO:3, SEQ ID NO:5, SEQ ID NO:7, SEQ ID NO:9, SEQ ID NO:11, etc., and all polypeptides disclosed in the SEQ ID listing, which include all odd numbered SEQ ID NO:s from SEQ ID NO:3 through SEQ ID NO:1073.

[0088] The N. equitans genome (SEQ ID NO:1) is 490,885 base pairs and encodes the machinery for information processing and repair, but lacks that for lipid, cofactor, amino acid or nucleotide biosynthesis. Unusual features include a quite a few split genes, little evidence of lateral gene transfer, and few operons. The small genome size may be a consequence of genome reduction, and a lack of pseudogenes suggests an early adaptation to the parasitic lifestyle.

[0089] To shed light on the phylogenetic relationship among the Archaea, we concatenated and aligned the amino acid sequences of 35 ribosomal proteins. N. equitans was placed with high support at the most basal position within the Archaea in the maximum likelihood, maximum parsimony, and Bayseian trees suggesting that the Nanoarchaeota are the basal kingdom within the Archaea. In contrast to the bacterial small genome parasites, no free-living close relative to N. equitans could be detected so far. Therefore one cannot deduce the genome size of its possible precursor. The assumption of N. equitans being a non-reduced primitive genome would provide exciting possibilities for research about ancient features of parasitism, early organismal development, and also a starting point for the generation of a minimal autonomous genome.

[0090] The assumption of the genome of the invention (SEQ ID NO:1), an N. equitans genome, being a non-reduced primitive genome would provide exciting possibilities for research about ancient features of parasitism, early organismal development, and also a starting point for the generation of a minimal autonomous genome. Based on the fact that N. equitans possesses all the machinery for information processing and repair, it would be a perfect model to rebuild a universal genome based on different biological requirements. In contrast to minimize genomes, such as E. coli or Mycoplasma genitalium, in one aspect the invention provides methods for adding back to the genome of the invention (SEQ ID NO:1) all genes necessary to perform one or more desired metabolisms, synthesis of structures, performing cell cycles and other cellular and metabolic functions and the like.

[0091] The invention also provides methods using the genome of the invention (SEQ ID NO:1) for experimental studies within the framework of the minimal-gene-set concept and the ultimate construction of a minimal genome, as described, e.g., by Eugene V. Koonin, Annu. Rev. Genomics Hum. Genet. (2000) 01:99-116. These studies will advance our understanding of the basic principles of cell functioning by systematically detecting non-orthologous gene displacement and deciphering the roles of essential but functionally uncharacterized genes. The invention also provides methods using the genome of the invention (SEQ ID NO:1) in global knockout mutagenesis to analyze essential genes.

[0092] The invention's discovery of the archaeal kingdom Nanoarchaeota, and its sole species, Nanoarchaeum equitans, raised new questions about the evolution of the Archaea. Although ribosomal RNA sequences placed this species in a basal branch of the Archaea, analyses did not allow reliable placement of the organism's phylogenetic position in the 16S rRNA based tree of life. In addition, it was unclear whether N. equitans is a primitive or a derived member of the Archaea. SEQ ID NO:1, the genome of N. equitans, was deposited as GenBank accession no. ______. In one aspect, the genome of the invention has a single, circular chromosome of 490,885 basepairs (bp) and has an average G+C content of 31.6% (4). All 61 sense codons are used, but in line with the low G+C content the third codon position is mainly A or T. 539 open reading frames (ORFs) were identified that cover 92% of the genome; average ORF length is 835 bp. Functional roles were assigned to 66.8% of the annotated genes. Of the ORFs of unknown function only 18.3% have homologs in other organisms, while the remaining ones are unique to N. equitans (see Table 3, below).

[0093] Genes encoding single copies of 5S, 16S and 23S rRNA, and 35 tRNAs were identified. These stable RNAs exhibit much higher G+C content (65-80%) than the rest of the genome. This is likely due to the need to form stable secondary structures at the high growth temperature of N. equitans. The rRNA genes were not found in an operon. In fact, a low occurrence of operons is a notable feature of the N. equitans genome (SEQ ID NO:1). There is little evidence of significant lateral gene transfer in the genome; less than 5% of the N. equitans ORFs have close bacterial homologs and only about 14% have close crenarchaeal homologs. Finally, as no extrachromosomal elements could be detected (either by biochemical methods or during sequencing), the N. equitans genome of the invention (SEQ ID NO:1) represents the smallest sequenced genome of a cellular organism.

[0094] Given its small genome size it is not surprising that N. equitans lacks the metabolic capacity to synthesize many cell components, see Table 1.

TABLE 1
Comparison of N. equitans and other organisms with small genomes.

| | Nanoarchaeum | | | | |
|---|---|---|---|---|---|
| | equitans | M. genitalium^{a} | Buchnera sp. APS⁷ | R. prowazokii⁴ | T. paliidum⁹ |
| Genome size | 490,885 | 580,070 | 540,681 | 1,111,523 | 1,138,008 |
| (base pairs) | | | | | |
| G-C content | 31.6% | 31.6% | 26.3% | 29.1% | 52.8% |
| Glycolysis | − | + | + | − | + |
| Pentose Phoshate | − | Limited | + | − | + |
| Pathway | | | | | |
| TCA cycle | − | − | − | + | − |
| ATP production by | Limited | − | + | + | − |
| respiration | | | | | |
| Amino acid synthesis | − | − | + | − | − |
| Nucleotide synthesis | − | − | + | − | − |
| Lipid synthesis | − | Limited | − | + | + |
| DNA recombination/ | + | Limited | Limited | Limited | Limited |
| repair | | | | | |

(+) indicates all components of the pathway are present
(−) indicates that none of the components are present
^{a}Limited indicates that some but not all of the components are present.

[0095] Based on our current knowledge of metabolism, no ORFs were found that represent enzymes for the de novo synthesis of amino acids, nucleotides, cofactors or lipids, and known genes are absent for glycolysis, the pentose phosphate pathway and the citric acid cycle. This absence of metabolic capacity must necessitate the transport of many cellular components and metabolites from the host Ignicoccus, but it is currently unclear how this is accomplished. It remains enigmatic how N. equitans gains energy. At least a basic A1A0-type ATPase consisting of only 5 subunits as well as some components of an electron transport chain could be identified. Only five transport proteins have been identified in this genome: a Na+/Ca2+ exchange protein, a Mg2+- and Co2+-transporter, a C-4 dicarboxylate transporter, one ABC type transporter system involved in lipoprotein release, and an uncharacterized iron-regulated ABC transporter. N. equitans may acquire its lipids directly from its host Ignicoccus; a striking feature of this organism is the vast formation of vesicles at its cytoplasmic membrane, which may be part of a supply mechanism of cell components to N. equitans. (see, e.g., Huber (2000) Int. J. Syst. Evol. Microbiol. 50:2093). As similar features are found in parasites, the genome of N. equitans (SEQ ID NO:1) points to a parasitic life style. As a matter of fact, the presence of several N. equitans cells prevented multiplication of the Ignicoccus host.

[0096] A common feature of bacterial obligate parasites is their small genome size (see, e.g., Fraser (1995) Science 270:397; Shigenobu (2000) Nature 407:81; Andersson (1998) Nature 396:133; Fraser (1998) Science 281:375) as a consequence of genome reduction during adaptation to parasitic life style. This may also be true for N. equitans. The absence of many generally conserved operons (e.g., rRNAs, ATPase and RNA polymerase subunits) as well as the lack of duplicated genes is evidence for multiple genome rearrangements which usually accompany the reduction process (see, e.g., Andersson (1998) Trends Microbiol. 6:263).

[0097] In contrast to many obligate parasites, N. equitans has a repertoire of repair enzymes for base and nucleotide excision including endonucleases III, IV, and V (NEQ126a, NEQ398, NEQ077a, NEQ368, NEQ346a), rad2 (NEQ088) and rad25 (NEQ369). In addition, the presence of homologs of radA (NEQ426), Rad50 (NEQ256) and a Holliday-junction resolvase (NEQ424) may indicate that N. equitans can undergo homologous recombination. The presence of these enzymes sets N. equitans apart from other organisms with small genomes in significant ways. First, N. equitans may be able to repair damage to DNA that is likely to occur in its high temperature habitat. In addition, it appears to have the potential to acquire new genes via lateral gene transfer. In addition, despite its small genome N. equitans might have the capacity to adapt to changing environments. It is noteworthy that many organisms with small genomes have lost recombination/repair enzymes even though these losses incur significant negative effects. Organisms that lack these enzymes are at best evolutionarily stable (see, e.g., Tamas (2002) Science 296:2376) and at worst subject to the negative effects of increased occurrence and fixation of deleterious mutations (see, e.g., Moran (1996) Proc. Natl. Acad. Sci U.S.A. 93:2873).

[0098] N. equitans possesses a large and reasonably complete set of components for information processing (replication, transcription and translation) and completion of the cell cycle. For transcription, a4DNA-dependent RNA polymerase consisting of 14 subunits, and the archaeal genre proteins involved in transcription initiation, elongation and termination could be identified. The gene sets for DNA replication and cell cycle are similar to those found in Euryarchaeota and contain several components usually absent from Crenarchaeota (e.g., DNA polymerase II, two copies of ftsZ, and histones). The translational machinery of N. equitans is similar to other Archaea. However, three tRNA genes (for glutamate, histidine and tryptophan) were not found in N. equitans. These tRNA species may have an unusual sequence/structure (resembling e.g., mitochondrial tRNAs or M kandleri TRNA Glu) causing them to be missed by tRNA scan-SE (see, e.g., Lowe (1997) Nucleic Acids Res. 25:955). tRNA import from the host, the possibility of a tRNA species with dual function (based on different nucleotide modification) or of an anticodon change by RNA editing may also be plausible. Four tRNA species (for serine, tyrosine, isoleucine, and methionine) contain single introns in the expected position. Also present are two homologs of EndA (NEQ261, NEQ205), an intron excision enzyme that is found in all other Archaea. In some Euryarchaeota an in-frame gene duplication of EndA has occurred followed by a specialization of each domain (see, e.g., Lykke-Andersen (1997) EMBO J. 16:6290). While NEQ205 is most similar to Methanococcus jannaschii EndA (which does not have the gene duplication), NEQ261 shows more similarity to the N-terminal domain of the duplicated endA of Methanosarcina acetivorans. Also identified were some genes linked to snoRNA-dependent RNA modifications, including pseudouridine synthase (truB family, CBF5; NEQ454) and fibrillarin (NEQ125). This is in agreement with the recent reports that some archaea, possess snoRNAs (Omer (2000) Science 288:517). Thus, snoRNA metabolism may be an ancient characteristic of archaea that was present in a predecessor of all known archaeal phyla.

[0099] An unusual characteristic of the N. equitans genome (SEQ ID NO:1) is the high number of split genes, whose gene product is encoded by two physically separated ORFs, see Table 2.

TABLE 2
Split genes in N. equitans.

| | ORF encoding | ORF encoding | Distance between |
|---|---|---|---|
| Gene | N-terminal part | C-terminal part | ORFs |
| Reverse gyrase^{a} | NEQ434 | NEQ318 | 95,625 bp |
| Topoisomerase I | NEQ045 | NEQ324 | 241,346 bp |
| Glu-tRNA^{Gla} amidotransferase (gatE) | NEQ245 | NEQ396 | 126,409 bp |
| Alanyl-tRNA synthetase | NEQ547 | NEQ211 | 185,194 bp |
| DNA polymerase B^{b} | NEQ068 | NEQ528 | 83,301 bp |
| RNA polymerase subunit B^{c} | NEQ173 | NEQ156 | 13,388 bp |
| Large helicase related protein | NEQ003 | NEQ409 | 134,395 bp |
| archaeosine tRNA-guanine transglycosylase | NEQ124 | NEQ305 | 164,284 bp |
| Conserved hypothetical protein (RNA-binding | NEQ438 | NEQ506 | 62,414 bp |
| protein homologous to eukaryotic snRNP) | | | |

^{a}also split in Methanopyrus kandleri (different site)
^{b}also split in Methanothermobacter thermoautotrophicus
^{c}also split in methanogens, Archaeoglobales, and extreme halophiles

[0100] In most cases the site of the split lies between functional domains of the encoded proteins; thus it seems likely that the two separated ORFs encode parts of the corresponding enzyme, which assemble to a functional protein after independent expression. The split gene separated by the largest segment of DNA (see Table 2) encodes alanyl-tRNA synthetase. This gene provided the opportunity to test the idea that the individual protein parts are catalytically inactive, but that they reconstitute activity when combined (see, e.g., Burbaum (1991) Biochemistry 30:319). Only a combination of both parts of the split protein yielded a fully active enzyme as checked by the standard aminoacylation assay (FIG. 5, see also, discussion, below). Thus, in this case trans-splicing is not a prerequisite for enzyme activity (see, e.g., Ahel (2002) J. Biol. Chem. 277:34743).

[0101] The N. equitans reverse gyrase is split into two distinct genes encoding a helicase (NEQ434) and a topoisomerase (NEQ318) domain. Reverse gyrase appears to be the fusion product of a helicase and a5topoisomerase domain, and catalyzes positive supercoil formation in DNA (see, e.g., Krah (1996) Proc. Natl. Acad. Sci. U.S.A. 93:106; Forterre (2002) Trends Genet. 18:236). Since this enzyme is only present in hyperthermophiles, it was concluded that hyperthermophily appeared secondarily in the evolution of life (see, e.g., Forterre (2000) Trends Genet. 16:152). In light of the presence of independent helicase and topoisomerase domains in the deep rooted N. equitans, the evolution of hyperthermophily may have been a very early event in agreement with the view of a hot primeval earth (see, e.g., Stetter, in Commentarii Pontifica Academica Scientiarium, Vatican City (1997) vol. IV).

[0102] Another split gene encodes DNA-directed polymerase I. The N-terminal (NEQ068) and C-terminal (NEQ528) ORFs are separated by 83,301 bp and are located on opposite DNA strands. The C-terminal part (294 bp) of NEQ068 together with the N-terminal region (93 bp) of NEQ528 encode a mini-intein (129 aa). It is predicted that the two parts of the DNA polymerase are expressed separately and then covalently linked after the reassembled intein has been excised by a trans-splicing mechanism (see, e.g., Wu (1998) Proc. Natl. Acad. Sci. U.S.A. 95:9226).

[0103] It is unlikely that the split genes are solely the by-product of a small or reduced genome as the other known small genomes do not contain the number and type of split genes found in N. equitans. These split domain proteins may be early remnants of protein evolution that depended on domain fusion for the generation of modern/complex proteins (see, e.g., Doolittle (1995) Annu. Rev. Biochem. 64:287; Doolittle (1978) Nature 272:581; Gilbert (1997) Proc. Natl. Acad. Sci. U.S.A. 94:7698).

[0104] To shed light on the phylogenetic relationship among the Archaea the amino acid sequences of 35 ribosomal proteins were concatenated and aligned. A concatenated alignment of 35 ribosomal proteins was analyzed by maximum likelihood, Bayseian and parsimony analysis. N. equitans was placed with high support at the most basal position within the Archaea in the maximum likelihood, maximum parsimony, and Bayseian trees (see FIG. 6) suggesting that the Nanoarchaeota are the basal kingdom within the Archaea. FIG. 6 schematically illustrates the phylogenetic position of Nanoarchaeum equitans within the Archaea. The tree was determinedly the maximum likelihood method, based on 35 concatenated ribosomal protein sequences. Numbers indicate percentage of bootstrap resamplings. Scale bar corresponds to estimated substitutions per 100 positions.

[0105] Recent evidence shows that N. equitans is not the only extant member of the Nanoarchaeota. Two sequences from Caldera Uzon (Kamchatka) and Yellowstone National Park (USA) exhibited 83% sequence similarity to N. equitans and therefore represent a distinct group within the Nanoarchaeota (Hohn (2002) Syst. Appl. Micro. 25:551). Light microscopy and fluorescence in situ hybridization reveal that these novel Nanoarchaeota are tiny cocci like N. equitans attached to other archaeal species. Similar to Ignicoccus, these hosts may gain energy by S/H-autotrophy, a metabolism considered to be primitive (Fischer (1983) Nature 301:511). In contrast to the bacterial small genome parasites, no free-living close relative to N. equitans could be detected so far. Therefore one cannot deduce the genome size of its possible precursor. The assumption of N. equitans being a non-reduced primitive genome would provide exciting possibilities for research about ancient features of parasitism, early organismal development, and also a starting point for the generation of a minimal autonomous genome.

TABLE 3

| SEQ | | | | | | | |
|---|---|---|---|---|---|---|---|
| ID | | Blast Hit/Manual | Genbank Definition | Blastp | Pfam & TIGR | EC | |
| NO: | Name | Annotation | of top Blastp hit | Evalue | Domains | Number | COG Hit |
| 1 | N/A | N/A - SEQ ID NO: 1 | N/A - SEQ ID NO: 1 is the DNA | | N/A - SEQ ID NO: 1 is the DNA | | |
| | | is the DNA sequence | sequence of the whole genome | | sequence of the whole genome | | |
| | | of the whole genome | | | | | |
| 2, 3 | NEQ001 | uncharacterized | conserved | 5.00E−27 | DUF57 Protein of unknown | | Poorly |
| | | conserved protein | hypothetical | | function DUF57 2.00e−06 | | characterized; |
| | | | [Methanococcus | | | | Function |
| | | | jannaschii]. | | | | unknown; Uncharacterized |
| | | | | | | | ACR 3e−28 |
| 4, 5 | NEQ003 | large helicase- | large helicase-related | 0 | DEAD DEAD/DEAH | 3.6.1.— | Poorly |
| | | related protein | protein [Pyrococcus | | box helicase 4.80e−47 | | characterized; |
| | | [Pyrococcus abyssi]. | abyssi]. | | :helicase₋ C | | General |
| | | SPLIT See SEQ ID | | | Helicase conserved | | function |
| | | NOS: 798, 799 | | | C-terminal domain | | prediction |
| | | | | | 1.70e−18 :recq recq | | only; Lhr-like |
| | | | | | ATP-dependent | | helicases 0 |
| | | | | | DNA helicase RecQ | | |
| | | | | | 4.50e−06 | | |
| 6, 7 | NEQ002 | fkbp-type peptidyl- | fkbp-type peptidyl- | 5.00E−13 | 0 | 5.2.1.8 | Cellular |
| | | prolyl cis- | prolyl cis-transisomerase | | | | processes; Posttranslational |
| | | transisomerase | [Methanothermobacter | | | | modification, |
| | | | thermautotrophicus]. | | | | protein |
| | | | | | | | turnover, |
| | | | | | | | chaperones; FKBP- |
| | | | | | | | type |
| | | | | | | | peptidyl-prolyl |
| | | | | | | | cis-transisomerases 2 |
| | | | | | | | 4e−14 |
| 8, 9 | NEQ004 | Uncharacterized | conserved | 3.00E−20 | DUF101 Protein of unknown | | Poorly |
| | | conserved | hypothetical protein | | function DUF101 2.90e−27 | | characterized; |
| | | protein[Methanopyrus | [Methanococcus | | | | Function |
| | | kandleri AV19] | jannaschii]. | | | | unknown; Uncharacterized |
| | | | | | | | ACR 3e−21 |
| 10, | NEQ005 | hypothetical | 288aa long | 6.00E−29 | DUF425 Protein of unknown | | Poorly |
| 11 | | carbamoylphosphate | hypothetical protein | | function (DUF425) 1.60e−13 | | characterized; |
| | | synthetase | [Sulfolobus tokodaii]. | | | | Function |
| | | [Aeropyrum pernix]. | | | | | unknown; Uncharacterized |
| | | | | | | | ACR 2e−25 |
| 12, | NEQ007 | methylated-DNA- | methylated-DNA- | 3.00E−12 | Methyltransf₋ 1 6-O- | 2.1.1. | Information |
| 13 | | [protein]-cysteineS- | [protein]-cysteine S- | | methylguanine DNA | 63 | storage and |
| | | methyltransferase | methyltransferase | | methyltransferase, | | processing; DNA |
| | | (ogt) | (ogt) [Pyrobaculum | | DNA binding domain | | replication, |
| | | | aerophilum]. | | 1.60e−07 :ogt ogt | | recombination |
| | | | | | methylated-DNA- | | and |
| | | | | | protein-cysteine | | repair; Methylated |
| | | | | | methyltransferase | | DNA- |
| | | | | | 9.60e−10 | | protein |
| | | | | | | | cysteine |
| | | | | | | | methyltransferase |
| | | | | | | | 8e−13 |
| 14, | NEQ006 | hypothetical protein | hypothetical protein | 3.00E−04 | 0 | | |
| 15 | | | [Clostridium | | | | |
| | | | perfringens]. | | | | |
| 16, | NEQ008 | hypothetical 2- | 418aa long conserved | 2.00E−82 | UPF0004 | 1.8.—.— | Information |
| 17 | | methylthioadeninesynthase | hypothetical protein | | Uncharacterized | | storage and |
| | | | [Sulfolobus tokodaii]. | | protein family | | processing; Translation, |
| | | | | | UPF0004 1.60e−22 | | ribosomal |
| | | | | | :TIGR00089 | | structure and |
| | | | | | TIGR00089 | | biogenesis; 2- |
| | | | | | conserved | | methylthioadenine |
| | | | | | hypothetical protein | | synthetase |
| | | | | | 3.30e−123 | | 6e−80 |
| | | | | | :TIGR01125 | | |
| | | | | | TIGR01125 | | |
| | | | | | conserved | | |
| | | | | | hypothetical protein | | |
| | | | | | TIGR01125 6.70e−19 | | |
| | | | | | :TIGR01212 | | |
| | | | | | TIGR01212 | | |
| | | | | | conserved | | |
| | | | | | hypothetical protein | | |
| | | | | | TIGR01212 3.60e−3 | | |
| | | | | | :Radical₋ SAM | | |
| | | | | | Radical SAM | | |
| | | | | | superfamily 5.10e−27 | | |
| 18, | NEQ009 | hypothetical protein | conserved | 8.00E−13 | 0 | | Poorly |
| 19 | | | hypothetical protein | | | | characterized; |
| | | | [Pyrobaculum | | | | General |
| | | | aerophilum]. | | | | function |
| | | | | | | | prediction |
| | | | | | | | only; Predicted |
| | | | | | | | acetyltransferase |
| | | | | | | | 1e−07 |
| 20, | NEQ010 | hypothetical protein | hypothetical protein | 0.01 | 0 | | |
| 21 | | | predicted by | | | | |
| | | | GeneMark [Bacillus | | | | |
| | | | anthracis A2012]. | | | | |
| 22, | NEQ011 | desulfoferrodoxin | SUPEROXIDE | 7.00E−27 | Desulfoferrodox | 1.15.—.— | Metabolism; Energy |
| 23 | | [Pyrococcus abyssi] | REDUCTASE (SOR). | | Desulfoferrodoxin | | production |
| | | | | | 6.20e−24 | | and |
| | | | | | :neela₋ ferrous | | conversion; Desulfoferrodoxin |
| | | | | | neela₋ ferrous | | 4e−28 |
| | | | | | desulfoferrodoxin | | |
| | | | | | ferrous iron-binding | | |
| | | | | | domain 2.00e−18 | | |
| 24, | NEQ012 | glycosyltransferase | glycosyltransferase | 2.00E−19 | Glycos₋ transf₋ 1 Glycosyl | | Cellular |
| 25 | | [Pyrococcusfuriosus | [Methanosarcina | | transferases group 1 2.60e−06 | | processes; Cell |
| | | DSM 3638] | acetivorans str. C2A]. | | | | envelope |
| | | | | | | | biogenesis, |
| | | | | | | | outer |
| | | | | | | | membrane; Predicted |
| | | | | | | | glycosyltransferases |
| | | | | | | | 1e−13 |
| 26, | NEQ013 | hypothetical | 377aa long | 6.00E−17 | Radical₋ SAM Radical SAM | | Poorly |
| 27 | | coenzyme PQQ | hypothetical | | superfamily 3.20e−21 | | characterized; |
| | | synthesisprotein | coenzyme PQQ | | | | General |
| | | [Sulfolobus tokodaii] | synthesis protein | | | | function |
| | | | [Sulfolobus tokodaii]. | | | | prediction |
| | | | | | | | only; Predicted |
| | | | | | | | Fe—S |
| | | | | | | | oxidoreductases |
| | | | | | | | 8e−17 |
| 28, | NEQ014 | C4-dicarboxylate | hypothetical protein | 3.00E−60 | tdt tdt C4-dicarboxylate | | Cellular |
| 29 | | transporter, | [Magnetococcus sp. | | transporter/malic acid | | processes; Inorganic |
| | | putative[Pyrococcus | MC-1]. | | transport protein 7.80e−33 | | ion |
| | | abyssi] | | | :C4dic₋ mal₋ tran C4- | | transport and |
| | | | | | dicarboxylate | | metabolism; Tellurite |
| | | | | | transporter/malic acid | | resistance |
| | | | | | transport protein 6.60e−32 | | protein and |
| | | | | | | | related |
| | | | | | | | permeases |
| | | | | | | | 3e−29 |
| 30, | NEQ015 | hypothetical | 257aa long conserved | 2.00E−22 | Thy1 Thymidylate synthase | | Metabolism; Nucleotide |
| 31 | | thymidylate | hypothetical protein | | complementing protein | | transport and |
| | | synthasecomplementing | [Sulfolobus tokodaii]. | | 1.20e−09 | | metabolism; Predicted |
| | | protein | | | | | alternative |
| | | | | | | | thymidylate |
| | | | | | | | synthase 1e−16 |
| 32, | NEQ016 | hypothetical protein | hypothetical protein | 1.00E−12 | DUF196 Uncharacterized | | Poorly |
| 33 | | | [Methanosarcina | | ACR, COG1343 7.60e−17 | | characterized; |
| | | | barkeri]. | | | | Function |
| | | | | | | | unknown; Uncharacterized |
| | | | | | | | ACR 4e−13 |
| 34, | NEQ017 | conserved | hypothetical protein | 3.00E−60 | DUF48 Protein of unknown | | Poorly |
| 35 | | hypothetical | [Pyrococcus | | function DUF48 8.20e−96 | | characterized; |
| | | protein[Pyrococcus | horikoshii]. | | :TIGR00287 TIGR00287 | | Function |
| | | horikoshii] | | | conserved hypothetical | | unknown; Uncharacterized |
| | | | | | protein TIGR00287 3.80e−79 | | ACR 2e−61 |
| 36, | NEQ018 | hypothetical protein | maturase [Euglena | 9.00E−05 | 0 | | |
| 37 | | | gracilis]. | | | | |
| 38, | NEQ019 | conserved | hypothetical protein | 1.00E−15 | | | Poorly |
| 39 | | hypothetical | [Pyrococcus | | | | characterized; |
| | | protein[Pyrococcus | horikoshii]. | | | | Function |
| | | horikoshii] | | | | | unknown; Uncharacterized |
| | | | | | | | ACR 7e−17 |
| 40, | NEQ020 | hypothetical protein | hypothetical protein | 6.00E−03 | 0 | | |
| 41 | | | [Methanosarcina | | | | |
| | | | mazei Goe1]. | | | | |
| 42, | NEQ022 | ATP-dependent RNA | hypothetical protein | 2.00E−53 | DEAD DEAD/DEAH | 2.7.7.— | Poorly |
| 43 | | helicase[Fusobacterium | [Pyrococcus | | box helicase 9.50e−06 | | characterized; |
| | | nucleatum] | horikoshii]. | | :helicase₋ C | | General |
| | | | | | Helicase conserved | | function |
| | | | | | C-terminal domain | | prediction |
| | | | | | 5.80e−4 | | only; Predicted |
| | | | | | | | helicases |
| | | | | | | | 1e−54 |
| 44, | NEQ021 | RecB family | hypothetical protein | 1.00E−30 | DUF83 Domain of unknown | | Information |
| 45 | | exonuclease | [Pyrococcus | | function DUF83 2.50e−25 | | storage and |
| | | | horikoshii]. | | :TIGR00372 TIGR00372 | | processing; DNA |
| | | | | | conserved hypothetical | | replication, |
| | | | | | protein TIGR00372 3.80e−40 | | recombination |
| | | | | | | | and |
| | | | | | | | repair; RecB |
| | | | | | | | family |
| | | | | | | | exonuclease |
| | | | | | | | 1e−31 |
| 46, | NEQ023 | protease | protease | 5.00E−17 | 9.70E−16 | 3.4.—.— | Poorly |
| 47 | | [Pyrobaculum | [Pyrobaculum | | | | characterized; |
| | | aerophilum] | aerophilum]. | | | | General |
| | | | | | | | function |
| | | | | | | | prediction |
| | | | | | | | only; Predicted |
| | | | | | | | Zn- |
| | | | | | | | dependent |
| | | | | | | | peptidases |
| | | | | | | | 2e−13 |
| 48, | NEQ024 | hypothetical sulfide | flavoprotein | 2.00E−88 | pyr₋ redox Pyridine | 1.6.99.3 | Poorly |
| 49 | | dehydrogenase[flavo | reductase, conjectural | | nucleotide- | | characterized; |
| | | cytochrome c] | [Pyrobaculum | | disulphide | | General |
| | | flavoprotein | aerophilum]. | | oxidoreductase | | function |
| | | | | | 2.20e−05 | | prediction |
| | | | | | | | only; Uncharacterized |
| | | | | | | | NAD(FAD)- |
| | | | | | | | dependent |
| | | | | | | | dehydrogenases |
| | | | | | | | 3e−25 |
| 50, | NEQ025 | glucose-1- | glucose-1-phosphate | 4.00E−45 | NTP₋ transferase | 2.7.7. | Cellular |
| 51 | | phosphatethymidylyltransferase | thymidylyltransferase | | Nucleotidyl | 24 | processes; Cell |
| | | (graD-1) | (graD-1) | | transferase 1.10e−23 | | envelope |
| | | [A. | [Archaeoglobus | | :galU galU UTP- | | biogenesis, |
| | | | fulgidus]. | | glucose-1- | | outer |
| | | | | | phosphate | | membrane; Nucleoside- |
| | | | | | uridylyltransferase | | diphosphate- |
| | | | | | 1.90e−07 :rmlA rmlA | | sugar |
| | | | | | glucose-1- | | pyrophosphorylases |
| | | | | | phosphate | | involved in |
| | | | | | thymidylyltransferase | | lipopolysaccharide |
| | | | | | 2.60e−3 | | biosynthesis/translation |
| | | | | | :rmlA₋ long | | initiation |
| | | | | | rmlA₋ long glucose- | | factor eIF2B |
| | | | | | 1-phosphate | | subunits 3e−46 |
| | | | | | thymidyltransferase | | |
| | | | | | 4.10e−3 | | |
| 52, | NEQ026 | hypothetical protein | hypothetical protein | 0.31 | 0 | | |
| 53 | | | [Clostridium | | | | |
| | | | thermocellum ATCC | | | | |
| | | | 27405]. | | | | |
| 54, | NEQ028 | hypothetical protein | hypothetical protein | 2.00E−03 | 0 | | |
| 55 | | | [Plasmodium yoelii | | | | |
| | | | yoelii]. | | | | |
| 56, | NEQ027 | hypothetical protein | putative bir1 protein | 0.5 | 0 | | |
| 57 | | | [Plasmodium yoelii | | | | |
| | | | yoelii]. | | | | |
| 58, | NEQ029 | hypothetical protein | protein disulfide | 0.03 | 0 | | |
| 59 | | | isomerase 4 [Giardia | | | | |
| | | | intestinalis]. | | | | |
| 60, | NEQ030 | holocytochrome-c | holocytochrome-c | 3.00E−13 | DsbD Cytochrome C | | Cellular |
| 61 | | synthase[Methanosarcina | synthase | | biogenesis protein | | processes; Posttranslational |
| | | acetivorans str. | [Methanosarcina | | transmembrane region | | modification, |
| | | C2A] | acetivorans str. C2A]. | | 4.10e−4 | | protein |
| | | | | | | | turnover, |
| | | | | | | | chaperones; Cytochrome c |
| | | | | | | | biogenesis |
| | | | | | | | protein 2e−13 |
| 62, | NEQ031 | Predicted RNA- | 181aa long conserved | 3.00E−18 | | | Poorly |
| 63 | | binding | hypothetical protein | | | | characterized; |
| | | proteincontaining KH | [Sulfolobus tokodaii]. | | | | General |
| | | domain) [M. kandleri] | | | | | function |
| | | | | | | | prediction |
| | | | | | | | only; Predicted |
| | | | | | | | RNA- |
| | | | | | | | binding |
| | | | | | | | protein |
| | | | | | | | (contains KH |
| | | | | | | | domains) 3e−16 |
| 64, | NEQ032 | hypothetical protein | repeat organellar | 4.00E−03 | 0 | | |
| 65 | | | protein-related | | | | |
| | | | [Plasmodium yoelii | | | | |
| | | | yoelii]. | | | | |
| 66, | NEQ033 | hypothetical protein | hypothetical protein | 9.00E−07 | 0 | | |
| 67 | | | [Cytophaga | | | | |
| | | | hutchinsonii]. | | | | |
| 68, | NEQ034 | hypothetical protein | similar to Plasmodium | 1.00E−05 | 0 | | |
| 69 | | | falciparum (isolate | | | | |
| | | | 3D7). Hypothetical | | | | |
| | | | protein [Dictyostelium | | | | |
| | | | discoideum]. | | | | |
| 70, | NEQ035 | hypothetical protein | hypothetical protein | 3.00E−03 | 0 | | |
| 71 | | | [Lactobacillus | | | | |
| | | | gasseri]. | | | | |
| 72, | NEQ036 | hypothetical protein | Hypothetical protein | 0.02 | 0 | | |
| 73 | | | [Clostridium | | | | |
| | | | acetobutylicum]. | | | | |
| 74, | NEQ038 | transcription initiation | Ribosomal protein | 5.00E−20 | Ribosomal₋ L37ae | | Information |
| 75 | | factor IID, TATA-box | L37AE/L43A | | Ribosomal L37ae protein | | storage and |
| | | binding protein (TBP) | [Methanopyrus | | family 2.20e−26 :L37a L37a | | processing; Translation, |
| | | | kandleri AV19]. | | ribosomal protein L37a | | ribosomal |
| | | | | | 9.10e−27 | | structure and |
| | | | | | | | biogenesis; Ribosomal |
| | | | | | | | protein |
| | | | | | | | L37AE/L43A |
| | | | | | | | 7e−20 |
| 76, | NEQ037 | Small nuclear | putative U6 snRNA- | 9.00E−05 | Sm Sm protein 1.30e−11 | | |
| 77 | | ribonucleoprotein(sn | ASSOCIATED SM- | | | | |
| | | RNP) homolog | LIKE PROTEIN | | | | |
| | | | [Encephalitozoon | | | | |
| | | | cuniculi]. | | | | |
| 78, | NEQ039 | hypothetical protein | transcription initiation | 1.00E−24 | TBP Transcription factor | | Information |
| 79 | | | factor IID, TATA-box | | TFIID (or TATA-binding | | storage and |
| | | | binding protein | | protein, TBP) 4.60e−21 :TBP | | processing; Transcription; |
| | | | [Methanococcus | | Transcription factor TFIID (or | | Transcription |
| | | | jannaschii]. | | TATA-binding protein, TBP) | | initiation |
| | | | | | 1.10e−06 | | factor TFIID |
| | | | | | | | (TATA- |
| | | | | | | | binding |
| | | | | | | | protein) 1e−25 |
| 80, | NEQ041 | hypothetical protein | predicted protein | 0.36 | 0 | | |
| 81 | | | [Methanosarcina | | | | |
| | | | acetivorans str. C2A]. | | | | |
| 82, | NEQ040 | hypothetical protein | hypothetical protein | 6.00E−05 | PAP2 PAP2 superfamily 6.00e−05 | | |
| 83 | | | T13C5.6- | | | | |
| | | | Caenorhabditis | | | | |
| | | | elegans. | | | | |
| 84, | NEQ042 | thermostable | thermostable | 1.00E−135 | Peptidase₋ M32 | 3.4.17. | Metabolism; Amino |
| 85 | | carboxypeptidase | carboxypeptidase | | Carboxypeptidase | 19 | acid |
| | | [P. aerophilum] | [Pyrobaculum | | Taq (M32) | | transport and |
| | | | aerophilum]. | | metallopeptidase | | metabolism; Zn- |
| | | | | | 2.80e−174 | | dependent |
| | | | | | | | carboxypeptidases |
| | | | | | | | 1e−129 |
| 86, | NEQ043 | hypothetical protein | ribosomal protein S26 | 0.09 | 0 | | |
| 87 | | | [Spodoptera | | | | |
| | | | frugiperda]. | | | | |
| 88, | NEQ044 | O-sialoglycoprotein | O-sialoglycoprotein | 4.00E−23 | RIO1 | 3.4.24. | Cellular |
| 89 | | endopeptidase[Methanosarcina | endopeptidase | | RIO1/ZK632.3/MJ04 | 57 | processes; Signal |
| | | acetivorans str. C2A] | [Methanosarcina | | 44 family 1.60e−4 | | transduction |
| | | | acetivorans str. C2A]. | | | | mechanisms; |
| | | | | | | | Mn2+- |
| | | | | | | | dependent |
| | | | | | | | serine/threonine |
| | | | | | | | protein |
| | | | | | | | kinase 1e−22 |
| 90, | NEQ045 | DNA topoisomerase I | DNA topoisomerase I | 6.00E−75 | Topoisom₋ bac DNA | 5.99. | Information |
| 91 | | [Pyrococcushorikoshii] | [Pyrococcus | | topoisomerase | 1.2 | storage and |
| | | SPLIT see SEQ ID | horikoshii]. | | 2.20e−23 :Toprim | | processing; DNA |
| | | NOS: 632, 633 | | | Toprim domain | | replication, |
| | | | | | 4.00e−11 :topA₋ bact | | recombination |
| | | | | | topA₋ bact DNA | | and |
| | | | | | topoisomerase I | | repair; Topoisomerase |
| | | | | | 2.90e−09 :topB topB | | IA |
| | | | | | DNA topoisomerase | | 4e−76 |
| | | | | | III 6.00e−05 | | |
| | | | | | :topA₋ arch | | |
| | | | | | topA₋ arch DNA | | |
| | | | | | topoisomerase I | | |
| | | | | | 1.10e−31 | | |
| 92, | NEQ047 | hypothetical HESA | HESA protein | 2.00E−10 | ThiF ThiF family 3.00e−4 | | Metabolism; Coenzyme |
| 93 | | protein[Aeropyrum | [Aeropyrum pernix]. | | | | metabolism; Dinucleotide- |
| | | pernix] | | | | | utilizing |
| | | | | | | | enzymes |
| | | | | | | | involved in |
| | | | | | | | molybdopterin |
| | | | | | | | and thiamine |
| | | | | | | | biosynthesis |
| | | | | | | | family 2 1e−11 |
| 94, | NEQ046 | hypothetical protein | Unknown | 0.03 | 0 | | |
| 95 | | | [Streptococcus | | | | |
| | | | agalactiae NEM316] | | | | |
| 96, | NEQ048 | hypothetical protein | hypothetical protein | 5.00E−04 | 0 | | |
| 97 | | | [Plasmodium | | | | |
| | | | falciparum 3D7]. | | | | |
| 98, | NEQ050 | hypothetical protein | hypothetical protein | 4.00E−06 | NTP₋ transf₋ 2 Nucleotidyltransferase domain | | |
| 99 | | | [Plasmodium | | | | |
| | | | falciparum 3D7]. | | | | |
| 100, | NEQ049 | Predicted Fe—S | conserved | 3.00E−14 | TIGR01212 TIGR01212 | | Poorly |
| 101 | | oxidoreductase[Thermoplasma | hypothetical protein | | conserved hypothetical | | characterized; |
| | | volcanium] | [Archaeoglobus | | 3.20e−4 protein TIGR01212 6.00e−3 | | General |
| | | | fulgidus]. | | :Radical₋ SAM Radical SAM | | function |
| | | | | | superfamily 4.10e−16 | | prediction |
| | | | | | | | only; Predicted |
| | | | | | | | Fe—S |
| | | | | | | | oxidoreductases |
| | | | | | | | 2e−15 |
| 102, | NEQ051 | ferredoxin-NADP | hypothetical protein | 3.00E−17 | FAD₋ binding₋ 6 | 1.18. | Metabolism; Energy |
| 103 | | reductase[Neisseria | [Cytophaga | | Oxidoreductase | 1.2 | production |
| | | meningitidis MC58] | hutchinsonii]. | | FAD-binding domain | | and |
| | | | | | 1.20e−13 | | conversion; Flavodoxin |
| | | | | | :NAD₋ binding₋ 1 | | reductases |
| | | | | | Oxidoreductase | | (ferredoxin- |
| | | | | | NAD-binding | | NADPH |
| | | | | | domain 1.50e−06 | | reductases) |
| | | | | | | | family 1 5e−14 |
| 104, | NEQ052 | peptide chain | peptide chain release | 1.00E−77 | eRF1₋ 1 eRF1 domain 1 | | Information |
| 105 | | release factor | factor aRF, subunit 1 | | 2.40e−31 :eRF1₋ 2 eRF1 | | storage and |
| | | aRF, subunit 1 | [Pyrococcus abyssi]. | | domain 2 1.40e−45 :eRF1₋ 3 | | processing; Translation, |
| | | [Pyrococcus abyssi] | | | eRF1 domain 3 9.70e−08 | | ribosomal |
| | | | | | :eRF eRF peptide chain | | structure and |
| | | | | | release factor eRF/aRF, | | biogenesis; Peptide |
| | | | | | subunit 1 2.10e−67 :pelA | | chain |
| | | | | | pelA cell division protein | | release factor |
| | | | | | pelota 3.00e−3 | | eRF1 7e−79 |
| 106, | NEQ053 | RNA | RNA | 2.00E−86 | ygcA ygcA RNA | 2.1.1.— | Information |
| 107 | | methyltransferase | methyltransferase | | methyltransferase, | | storage and |
| | | [Pyrococcushorikoshii] | [Pyrococcus | | TrmA family 4.30e−55 | | processing; Translation, |
| | | | horikoshii]. | | | | ribosomal |
| | | | | | | | structure and |
| | | | | | | | biogenesis; SAM- |
| | | | | | | | dependent |
| | | | | | | | methyltransferases |
| | | | | | | | related |
| | | | | | | | to tRNA |
| | | | | | | | (uracil-5-)- |
| | | | | | | | methyltransferase |
| | | | | | | | 1e−87 |
| 108, | NEQ054 | Conserved | hypothetical protein | 9.00E−07 | | | Poorly |
| 109 | | hypothetical | [Synechocystis sp. | | | | characterized; |
| | | protein[Pyrococcus | PCC 6803]. | | | | Function |
| | | abyssi] | | | | | unknown; Predicted |
| | | | | | | | membrane |
| | | | | | | | protein 1e−07 |
| 110, | NEQ055 | cysteinyl-tRNA | cysteinyl-tRNA | 1.00E−117 | tRNA-synt₋ 1e tRNA | 6.1.1. | Information |
| 111 | | synthetase[Pyrococcus | synthetase | | synthetases class I | 16 | storage and |
| | | furiosus DSM | [Pyrococcus furiosus | | (C) 3.70e−139 :metG | | processing; Translation, |
| | | 3638] | DSM 3638]. | | metG methionyl- | | ribosomal |
| | | | | | tRNA synthetase | | structure and |
| | | | | | 2.90e−07 :cysS cysS | | biogenesis; Cysteinyl- |
| | | | | | cysteinyl-tRNA | | tRNA |
| | | | | | synthetase 1.70e−140 | | synthetase |
| | | | | | | | 1e−115 |
| 112, | NEQ057 | Cell division control | 398aa long | 4.00E−61 | AAA ATPase family | | Information |
| 113 | | 6/orc1 | hypothetical cell | | associated with various | | storage and |
| | | proteinhomolog | division control protein | | cellular activities (AAA) | | processing; DNA |
| | | (cdc6-1) [S solfataricus] | 6 [Sulfolobus | | 1.10e−4 | | replication, |
| | | | tokodaii]. | | | | recombination |
| | | | | | | | and |
| | | | | | | | repair; Cdc6- |
| | | | | | | | related |
| | | | | | | | protein, AAA |
| | | | | | | | superfamily |
| | | | | | | | ATPase 2e−61 |
| 114, | NEQ056 | hypothetical protein | hypothetical protein | 4.00E−03 | 0 | | |
| 115 | | | [Plasmodium | | | | |
| | | | falciparum 3D7]. | | | | |
| 116, | NEQ058 | SSU ribosomal | SSU ribosomal | 1.00E−49 | Ribosomal₋ S12 Ribosomal | | Information |
| 117 | | protein | protein S12P | | protein S12 2.40e−57 | | storage and |
| | | S12P[Pyrococcus | [Pyrococcus abyssi]. | | :rpsL₋ bact rpsL₋ bact | | processing; Translation, |
| | | abyssi] | | | ribosomal protein S12 1.30e−4 | | ribosomal |
| | | | | | :S23₋ S12₋ E₋ A | | structure and |
| | | | | | S23₋ S12₋ E₋ A ribosomal | | biogenesis; Ribosomal |
| | | | | | protein S23 (S12) 3.60e−75 | | protein S12 |
| | | | | | | | 1e−50 |
| 118, | NEQ059 | Predicted ATPase | TWITCHING | 1.00E−163 | KH KH domain 7.40e−05 | | Poorly |
| 119 | | (PilT family) | MOBILITY (PILT) | | :PIN PIN domain 5.60e−08 | | characterized; |
| | | | RELATED PROTEIN | | | | General |
| | | | (PILT) [Pyrococcus | | | | function |
| | | | abyssi]. | | | | prediction |
| | | | | | | | only; ATPases |
| | | | | | | | of the PilT |
| | | | | | | | family 1e−164 |
| 120, | NEQ060 | hypothetical protein | RNA helicase | 0.11 | 0 | | |
| 121 | | | [Plasmodium yoelii | | | | |
| | | | yoelii]. | | | | |
| 122, | NEQ061 | UDP-N- | UDP-N- | 4.00E−21 | Glycos₋ transf₋ 4 | 2.7.8. | Cellular |
| 123 | | acetylglucosamine- | acetylglucosamine- | | Glycosyl transferase | 15 | processes; Cell |
| | | dolichyl-phosphateN- | dolichyl-phosphate N- | | 3.90e−10 | | envelope |
| | | acetylglucosaminephosphotransferase | acetylglucosaminephosphotransferase | | | | biogenesis, |
| | | | (gnptA) [Sulfolobus | | | | outer |
| | | | solfataricus]. | | | | membrane; UDP- |
| | | | | | | | N- |
| | | | | | | | acetylmuramyl |
| | | | | | | | pentapeptide |
| | | | | | | | phosphotransferase/ |
| | | | | | | | UDP- |
| | | | | | | | N- |
| | | | | | | | acetylglucosamine- |
| | | | | | | | 1- |
| | | | | | | | phosphate |
| | | | | | | | transferase |
| | | | | | | | 9e−21 |
| 124, | NEQ062 | Hypothetical protein; | virulence factor | 7.00E−05 | 0 | | |
| 125 | | permease? | homolog MviB | | | | |
| | | | [Aquifex aeolicus]. | | | | |
| 126, | NEQ063 | ribonuclease HII | ribonuclease HII | 8.00E−34 | RNase₋ HII | 3.1.26.4 | Information |
| 127 | | (rnhB)[Pyrobaculum | (rnhB) [Pyrobaculum | | Ribonuclease HII | | storage and |
| | | aerophilum] | aerophilum]. | | 2.40e−34 :rnhC rnhC | | processing; DNA |
| | | | | | ribonuclease HIII | | replication, |
| | | | | | 3.40e−3 :TIGR00729 | | recombination |
| | | | | | TIGR00729 | | and |
| | | | | | ribonuclease HII | | repair; Ribonuclease |
| | | | | | 3.90e−45 | | HII 5e−34 |
| 128, | NEQ064 | arylsulfatase, | conserved | 1.00E−45 | lactamase₋ B Metallo-beta- | | Poorly |
| 129 | | putative | hypothetical protein | | lactamase superfamily | | characterized; |
| | | [Pyrococcusfuriosus | [Methanococcus | | 2.20e−06 | | General |
| | | DSM 3638] | jannaschii]. | | | | function |
| | | | | | | | prediction |
| | | | | | | | only; Metal- |
| | | | | | | | dependent |
| | | | | | | | hydrolases of |
| | | | | | | | the beta- |
| | | | | | | | lactamase |
| | | | | | | | superfamily III |
| | | | | | | | 8e−47 |
| 130, | NEQ065 | LSU ribosomal | 82aa long | 4.00E−12 | Ribosomal₋ L23 Ribosomal | | Information |
| 131 | | protein L23 | hypothetical 50S | | protein L23 1.40e−4 | | storage and |
| | | | ribosomal protein L23 | | | | processing; Translation, |
| | | | [Sulfolobus tokodaii]. | | | | ribosomal |
| | | | | | | | structure and |
| | | | | | | | biogenesis; Ribosomal |
| | | | | | | | protein L23 |
| | | | | | | | 8e−12 |
| 132, | NEQ066 | hypothetical protein | hypothetical protein | 3.00E−03 | 0 | | |
| 133 | | | [Plasmodium | | | | |
| | | | falciparum 3D7]. | | | | |
| 134, | NEQ067 | Predicted hydrolase | conserved protein | 7.00E−31 | | | Poorly |
| 135 | | of the metallo-beta- | [Methanosarcina | | | | characterized; |
| | | lactamase | mazei Goe1]. | | | | General |
| | | superfamily [M. | | | | | function |
| | | | | | | | prediction |
| | | | | | | | only; Predicted |
| | | | | | | | hydrolase of |
| | | | | | | | the metallo- |
| | | | | | | | beta- |
| | | | | | | | lactamase |
| | | | | | | | superfamily |
| | | | | | | | 3e−31 |
| 136, | NEQ068 | DNA-directed DNA | DNA-directed DNA | 6.00E−85 | DNA₋ pol₋ B DNA | 2.7.7.7 | Information |
| 137 | | polymerase I(family | polymerase | | polymerase family B | | storage and |
| | | B) [P furiosus] SPLIT | [Pyrococcus furiosus | | 3.70e−07 | | processing; DNA |
| | | see SEQ ID | DSM 3638]. | | :DNA₋ pol₋ B₋ exo | | replication, |
| | | NOS: 1028, 1029 | | | DNA polymerase | | recombination |
| | | | | | family B, | | and |
| | | | | | exonuclease domain | | repair; DNA |
| | | | | | 4.70e−40 | | polymerase |
| | | | | | | | elongation |
| | | | | | | | subunit |
| | | | | | | | (family B) 5e−85 |
| 138, | NEQ069 | SSU Ribosomal | Ribosomal protein | 1.00E−46 | Ribosomal₋ S11 Ribosomal | | Information |
| 139 | | protein | S11 [Methanopyrus | | protein S11 8.90e−50 | | storage and |
| | | S11[Methanopyrus | kandleri AV19]. | | | | processing; Translation, |
| | | kandleri AV19] | | | | | ribosomal |
| | | | | | | | structure and |
| | | | | | | | biogenesis; Ribosomal |
| | | | | | | | protein S11 |
| | | | | | | | 2e−46 |
| 140, | NEQ070 | hypothetical protein | expressed protein | 0.06 | 0 | | |
| 141 | | | [Arabidopsis thaliana]. | | | | |
| 142, | NEQ072 | hypothetical protein | P-type ATPase, | 0.39 | 0 | | |
| 143 | | | putative [Plasmodium | | | | |
| | | | falciparum 3D7]. | | | | |
| 144, | NEQ071 | conserved | conserved | 1.00E−11 | 0 | | Cellular |
| 145 | | hypothetical | hypothetical protein | | | | processes; Signal |
| | | protein[Archaeoglobus | [Archaeoglobus | | | | transduction |
| | | fulgidus] | fulgidus]. | | | | mechanisms; |
| | | | | | | | Predicted |
| | | | | | | | Ser/Thr |
| | | | | | | | protein kinase |
| | | | | | | | 1e−12 |
| 146, | NEQ073 | hypothetical protein | putative tyrosine- | 0.46 | 0 | | |
| 147 | | | protein kinase | | | | |
| | | | [Salmonella enterica | | | | |
| | | | subsp. enterica | | | | |
| | | | serovar Typhi]. | | | | |
| 148, | NEQ074 | ATPase subunit of | probable ATP- | 2.00E−17 | ABC₋ tran ABC transporter | | Poorly |
| 149 | | an iron- | dependent transport | | 5.10e−09 :3a0501s02 | | characterized; |
| | | regulatedABC-type | protein [imported]- | | 3a0501s02 Type II | | General |
| | | transporter [M. kandleri] | Pyrococcus furiosus. | | (General) Secretory | | function |
| | | | | | Pathway (IISP) Family | | prediction |
| | | | | | protein 7.80e−3 :3a0106s01 | | only; Iron- |
| | | | | | 3a0106s01 sulfate transport | | regulated |
| | | | | | system permease protein | | ABC |
| | | | | | 8.60e−4 :cbiO cbiO cobalt | | transporter |
| | | | | | transport protein ATP- | | ATPase |
| | | | | | binding subunit 1.30e−4 | | subunit SufC |
| | | | | | :ccmA ccmA heme exporter | | 8e−18 |
| | | | | | protein CcmA 4.90e−05 | | |
| 150, | NEQ076 | Predicted metal- | cleavage and | 1.00E−144 | lactamase₋ B Metallo-beta- | | Poorly |
| 151 | | dependent | polyadenylation | | lactamase superfamily | | characterized; |
| | | RNase, consists of a | specifity factor protein | | 2.40e−14 | | General |
| | | metallo-beta- | [Pyrococcus furiosus | | | | function |
| | | lactamase | DSM 3638]. | | | | prediction |
| | | | | | | | only; Predicted |
| | | | | | | | metal- |
| | | | | | | | dependent |
| | | | | | | | RNase, |
| | | | | | | | consists of a |
| | | | | | | | metallo-beta- |
| | | | | | | | lactamase |
| | | | | | | | domain and |
| | | | | | | | an RNA- |
| | | | | | | | binding KH |
| | | | | | | | domain 1e−144 |
| 152, | NEQ075 | LSU ribosomal | LSU ribosomal protein | 1.00E−68 | Ribosomal₋ L18p Ribosomal | | Information |
| 153 | | protein | L18P [Methanococcus | | L18p/L5e family 1.80e−35 | | storage and |
| | | L18P[Methanococcus | jannaschii]. | | | | processing; Translation, |
| | | jannaschii] | | | | | ribosomal |
| | | | | | | | structure and |
| | | | | | | | biogenesis; Ribosomal |
| | | | | | | | protein L18 |
| | | | | | | | 9e−70 |
| 154, | NEQ077 | glutamate | Glutamate | 1.00E−116 | GLFV₋ dehydrog | 1.4.1.3 | Metabolism; Amino |
| 155 | | dehydrogenase[Thermoplasma | dehydrogenase | | Glutamate/Leucine/ | | acid |
| | | volcanium] | [Thermoplasma | | Phenylalanine/Valine | | transport and |
| | | | volcanium]. | | dehydrogenase | | metabolism; Glutamate |
| | | | | | 1.40e−74 | | dehydrogenase/ |
| | | | | | :GLFV₋ dehydrog₋ N | | leucine |
| | | | | | Glu/Leu/Phe/Val | | dehydrogenase |
| | | | | | dehydrogenase, | | 1e−117 |
| | | | | | dimerisation domain | | |
| | | | | | 2.90e−61 | | |
| 156, | NEQ077a | Endonuclease IV | putative | 2.00E−32 | AP₋ endonuc₋ 2 AP | 3.1.21.2 | Information |
| 157 | | related protein | endonuclease IV | | endonuclease family | | storage and |
| | | [Pyrococcus abyssi] | [Pyrococcus furiosus | | 2 1.10e−4 | | processing; DNA |
| | | | DSM 3638]. | | | | replication, |
| | | | | | | | recombination |
| | | | | | | | and |
| | | | | | | | repair; Endonuclease |
| | | | | | | | IV 2e−33 |
| 158, | NEQ078 | conserved | hypothetical protein | 1.00E−161 | UPF0027 Uncharacterized | | Poorly |
| 159 | | hypothetical | [Aeropyrum pernix]. | | protein family UPF0027 | | characterized; |
| | | protein[Aeropyrum | | | 9.40e−267 | | Function |
| | | pernix] | | | | | unknown; Uncharacterized |
| | | | | | | | ACR 1e−162 |
| 160, | NEQ079 | hypothetical protein | conserved | 0.14 | 0 | | |
| 161 | | | hypothetical protein | | | | |
| | | | [Clostridium | | | | |
| | | | perfringens]. | | | | |
| 162, | NEQ080 | hypothetical protein | hypothetical protein | 0.15 | 0 | | |
| 163 | | | [Rhodopseudomonas | | | | |
| | | | palustris]. | | | | |
| 164, | NEQ081 | hypothetical protein | hypothetical protein | 1.2 | 0 | | |
| 165 | | | [Plasmodium yoelii | | | | |
| | | | yoelii]. | | | | |
| 166, | NEQ082 | translation | translation elongation | 1.00E−161 | GTP_EFTU | 3.6.1. | Information |
| 167 | | elongation factor eF- | factor eF-1, subunit | | Elongation factor Tu | 48 | storage and |
| | | 1, subunit alpha (tuf) | alpha (tuf) | | GTP binding domain | | processing; Translation, |
| | | [P furiosus] | [Pyrococcus furiosus | | 2.70e−92 | | ribosomal |
| | | | DSM 3638]. | | :GTP_EFTU_D2 | | structure and |
| | | | | | Elongation factor Tu | | biogenesis; GTPases- |
| | | | | | domain 2 8.50e−27 | | translation |
| | | | | | :GTP_EFTU_D3 | | elongation |
| | | | | | Elongation factor Tu | | factors 1e−162 |
| | | | | | C-terminal domain | | |
| | | | | | 9.90e−38 | | |
| | | | | | :small_GTP | | |
| | | | | | small_GTP small | | |
| | | | | | GTP-binding protein | | |
| | | | | | domain 7.40e−07 | | |
| | | | | | :selB selB | | |
| | | | | | selenocysteine- | | |
| | | | | | specific translation | | |
| | | | | | elongation factor | | |
| | | | | | 9.80e−07 :EF- | | |
| | | | | | 1_alpha EF-1_alpha | | |
| | | | | | translation | | |
| | | | | | elongation factor | | |
| | | | | | EF-1, subunit alpha | | |
| | | | | | 8.50e−242 :EF-Tu | | |
| | | | | | EF-Tu translation | | |
| | | | | | elongation factor Tu | | |
| | | | | | 1.10e−61 :FOLD979 | | |
| | | | | | No CATH | | |
| | | | | | Annotation 5.70e−08 | | |
| 168, | NEQ083 | SSU ribosomal | SSU ribosomal | 1.00E−21 | Ribosomal_S10 Ribosomal | | Information |
| 169 | | protein | protein S10AB | | protein S10p/S20e 5.40e−30 | | storage and |
| | | S10AB(rps10AB) | (rps10AB) [Sulfolobus | | :S10_Arc_S20_Euk | | processing; Translation, |
| | | [Sulfolobus | solfataricus]. | | S10_Arc_S20_Euk | | ribosomal |
| | | solfataricus] | | | ribosomal protein S10 7.10e−29 | | structure and |
| | | | | | :rpsJ_bact rpsJ_bact | | biogenesis; Ribosomal |
| | | | | | ribosomal protein S10 8.50e−09 | | protein S10 |
| | | | | | | | 2e−21 |
| 170, | NEQ084 | coenzyme F420 - | coenzyme F420-- | 4.00E−19 | CBS CBS domain 3.60e−3 | | Poorly |
| 171 | | quinoneoxidoreductase | quinone | | :CBS CBS domain 2.20e−4 | | characterized; |
| | | (EC1.6.5.-—) 41K | oxidoreductase (EC | | | | General |
| | | chain | 1.6.5.—) 41K chain | | | | function |
| | | | [validated] - | | | | prediction |
| | | | Archaeoglobus | | | | only; CBS |
| | | | fulgidus. | | | | domains 3e−20 |
| 172, | NEQ085 | hypothetical protein | GTA = Global | 0.38 | 0 | | |
| 173 | | | Transactivator = AcMN | | | | |
| | | | PV orf42 [Bombyxmori | | | | |
| | | | nuclear | | | | |
| | | | polyhedrosis virus]. | | | | |
| 174, | NEQ086 | hypothetical protein | hypothetical protein | 3.00E−11 | 0 | | |
| 175 | | | [Plasmodium | | | | |
| | | | falciparum 3D7]. | | | | |
| 176, | NEQ088 | DNA repair protein | DNA repair protein | 1.00E−102 | XPG_I XPG I-region 5.80e−42 | | Information |
| 177 | | RAD2[Pyrococcus | RAD2 [Pyrococcus | | :XPG_N XPG N-terminal | | storage and |
| | | abyssi] | abyssi]. | | domain 3.40e−27 | | processing; DNA |
| | | | | | | | replication, |
| | | | | | | | recombination |
| | | | | | | | and repair; 5′- |
| | | | | | | | 3′ |
| | | | | | | | exonuclease |
| | | | | | | | (including N- |
| | | | | | | | terminal |
| | | | | | | | domain of |
| | | | | | | | Poll) 1e−103 |
| 178, | NEQ087 | lysyl-tRNA | lysyl-tRNA | 5.00E−68 | tRNA-synt_1f tRNA | 6.1.1.6 | Information |
| 179 | | synthetase; LysS | synthetase; LysS | | synthetases class I | | storage and |
| | | (class- | [Halobacterium sp. | | (K) 3.60e−86 | | processing; Translation, |
| | | 1)[Halobacterium sp. | NRC-1]. | | :lysS_arch | | ribosomal |
| | | NRC-1] | | | lysS_arch lysyl- | | structure and |
| | | | | | tRNA synthetase | | biogenesis; Lysyl- |
| | | | | | 1.50e−75 | | tRNA |
| | | | | | | | synthetase |
| | | | | | | | class I 3e−69 |
| 180, | NEQ089 | hypothetical protein | similar to midasin, a | 0.18 | 0 | | |
| 181 | | | large protein with an | | | | |
| | | | N-terminal domain, a | | | | |
| | | | central AAA domain | | | | |
| | | | (with similarity to | | | | |
| | | | dynein) composed of | | | | |
| | | | 6 tandem AAA | | | | |
| | | | protomers, and a C- | | | | |
| | | | terminal M-domain | | | | |
| | | | containing MIDAS | | | | |
| | | | (Metal Ion Dependent | | | | |
| | | | Adhesion Site) | | | | |
| | | | sequence motifs; | | | | |
| | | | Mdn1p [Sacc | | | | |
| 182, | NEQ090 | polysaccharide | polysaccharide | 1.00E−15 | Polysacc_synt | | Poorly |
| 183 | | biosynthesis | biosynthesis protein, | | Polysaccharide biosynthesis | | characterized; |
| | | protein, putative | putative | | protein 4.30e−3 | | General |
| | | [Archaeoglobus | [Archaeoglobus | | | | function |
| | | fulgidus] | fulgidus]. | | | | prediction |
| | | | | | | | only; Membrane |
| | | | | | | | protein |
| | | | | | | | involved in |
| | | | | | | | the export of |
| | | | | | | | O-antigen |
| | | | | | | | and teichoic |
| | | | | | | | acid 9e−17 |
| 184, | NEQ091 | LSU ribosomal | LSU ribosomal protein | 3.00E−46 | Ribosomal_L10 | 4.2.99. | Information |
| 185 | | protein | L10E [Methanococcus | | Ribosomal protein | 18 | storage and |
| | | L10E[Methanococcus | jannaschii]. | | L10 1.30e−19 | | processing; Translation, |
| | | jannaschii] | | | | | ribosomal |
| | | | | | | | structure and |
| | | | | | | | biogenesis; Ribosomal |
| | | | | | | | protein L10 |
| | | | | | | | 2e−47 |
| 186, | NEQ092 | LSU ribosomal | LSU ribosomal protein | 3.00E−35 | Ribosomal_L14 Ribosomal | | Information |
| 187 | | protein L14P | L14P (rplN) | | protein L14p/L23e 2.60e−49 | | storage and |
| | | (rplN)[Methanococcus | [Methanococcus | | :rplN_bact rplN_bact | | processing; Translation, |
| | | jannaschii] | jannaschii]. | | ribosomal protein L14 9.50e−26 | | ribosomal |
| | | | | | | | structure and |
| | | | | | | | biogenesis; Ribosomal |
| | | | | | | | protein L14 |
| | | | | | | | 3e−36 |
| 188, | NEQ094 | hypothetical protein | conserved protein | 0.01 | 0 | | |
| 189 | | | [Methanosarcina | | | | |
| | | | mazei Goe1]. | | | | |
| 190, | NEQ093 | LSU ribosomal | LSU ribosomal protein | 6.00E−49 | Ribosomal_L5 Ribosomal | | Information |
| 191 | | protein | L5P [Pyrococcus | | protein L5 9.20e−19 | | storage and |
| | | L5P[Pyrococcus | abyssi]. | | :Ribosomal_L5_C ribosomal | | processing; Translation, |
| | | abyssi] | | | L5P family C-terminus | | ribosomal |
| | | | | | 1.80e−39 | | structure and |
| | | | | | | | biogenesis; Ribosomal |
| | | | | | | | protein L5 5e−50 |
| 192, | NEQ095 | hypothetical protein | Cucumber Basic | 0.33 | DUF124 Protein of unknown | | |
| | | | | | function DUF124 3.70e−3 | | |
| 193 | | | Protein, A Blue | | | | |
| | | | Copper Protein. | | | | |
| 194, | NEQ096 | Predicted P-loop | Predicted P-loop | 7.00E−60 | Acetyltransf | | Poorly |
| 195 | | ATPase fused to | ATPase fused to an | | Acetyltransferase (GNAT) | | characterized; |
| | | anacetyltransferase | acetyltransferase | | family 2.70e−3 | | General |
| | | [M. kandler] SPLIT | [Methanopyrus | | | | function |
| | | see SEQ ID NO: 964, | kandleri AV19]. | | | | prediction |
| | | 965 | | | | | only; Predicted |
| | | | | | | | P-loop |
| | | | | | | | ATPase fused |
| | | | | | | | to an |
| | | | | | | | acetyltransferase |
| | | | | | | | 1e−53 |
| 196, | NEQ097 | nuclease, putative | nuclease, putative | 2.00E−07 | SNase Staphylococcal | | Information |
| 197 | | [Haemophilusinfluenzae | [Haemophilus | | nuclease homologue 3.70e−07 | | storage and |
| | | Rd] | influenzae Rd]. | | | | processing; DNA |
| | | | | | | | replication, |
| | | | | | | | recombination |
| | | | | | | | and |
| | | | | | | | repair; Micrococcal |
| | | | | | | | nuclease |
| | | | | | | | (thermonuclease) |
| | | | | | | | homologs 1e−08 |
| 198, | NEQ098 | Predicted | hypothetical protein | 5.00E−18 | DUF118 Helix-turn-helix | | Information |
| 199 | | transcription | [Pyrococcus furiosus | | family DUF118 9.60e−16 | | storage and |
| | | regulator[Halobacterium | DSM 3638]. | | | | processing; Transcription; |
| | | sp. NRC-1] | | | | | Predicted |
| | | | | | | | transcriptional |
| | | | | | | | regulators 3e−18 |
| 200, | NEQ099 | hypothetical protein | wsv079 [shrimp white | 0.5 | 0 | | |
| 201 | | | spot syndrome virus]. | | | | |
| 202, | NEQ100 | hypothetical protein | hemolectin | 0.55 | 0 | | |
| 203 | | | [Drosophila | | | | |
| | | | melanogaster]. | | | | |
| 204, | NEQ101 | LSU Ribosomal | Ribosomal protein | 1.00E−41 | Ribosomal_L11 Ribosomal | | Information |
| 205 | | protein | L11 [Methanopyrus | | protein L11, RNA binding | | storage and |
| | | L11[Methanopyrus | kandleri AV19]. | | domain 2.10e−17 | | processing; Translation, |
| | | kandleri AV19] | | | :Ribosomal_L11_N | | ribosomal |
| | | | | | Ribosomal protein L11, N- | | structure and |
| | | | | | terminal domain 1.90e−17 | | biogenesis; Ribosomal |
| | | | | | | | protein L11 |
| | | | | | | | 3e−41 |
| 206, | NEQ103 | Archaeal/vacuolar- | V-TYPE ATP | 1.00E−180 | ATP-synt_ab ATP | 3.6.3. | Metabolism; Energy |
| 207 | | type H+- | SYNTHASE ALPHA | | synthase alpha/beta | 14 | production |
| | | ATPasesubunit A | CHAIN (V-TYPE | | family, nucleotide- | | and |
| | | [Methanopyrus | ATPASE SUBUNIT | | binding domain | | conversion; Archaeal/ |
| | | kandleri] | A). | | 4.30e−84 :ATP- | | vacuolar- |
| | | | | | synt_ab_C ATP | | type H+- |
| | | | | | synthase alpha/beta | | ATPase |
| | | | | | chain, C terminal | | subunit A 1e−176 |
| | | | | | domain 2.90e−18 | | |
| | | | | | :ATP-synt_ab_N | | |
| | | | | | ATP synthase | | |
| | | | | | alpha/beta family, | | |
| | | | | | beta-barrel domain | | |
| | | | | | 6.00e−17 :rho rho | | |
| | | | | | transcription | | |
| | | | | | termination factor | | |
| | | | | | Rho 5.50e−3 | | |
| | | | | | :fliI_yscN fliI_yscN | | |
| | | | | | ATPase FliI/YscN | | |
| | | | | | family 6.00e−09 | | |
| | | | | | :atpD atpD ATP | | |
| | | | | | synthase F1, beta | | |
| | | | | | subunit 2.00e−11 :V- | | |
| | | | | | ATPase_V1_B V- | | |
| | | | | | ATPase_V1_B V- | | |
| | | | | | type ATPase, | | |
| | | | | | subunit B 3.00e−09 | | |
| | | | | | :ATP_syn_B_arch | | |
| | | | | | ATP_syn_B_arch | | |
| | | | | | ATP synthase | | |
| | | | | | archaeal, B subunit | | |
| | | | | | 5.50e−10 :V- | | |
| | | | | | ATPase_V1_A V- | | |
| | | | | | ATPase_V1_A V- | | |
| | | | | | type ATPase, | | |
| | | | | | subunit A 2.10e−222 | | |
| | | | | | :ATP_syn_A_arch | | |
| | | | | | ATP_syn_A_arch | | |
| | | | | | ATP synthase | | |
| | | | | | archaeal, A subunit | | |
| | | | | | 0.0 | | |
| 208, | NEQ102 | histidyl-tRNA | histidyl-tRNA | 8.00E−88 | HGTP_anticodon | 6.1.1. | Information |
| 209 | | synthetase (class | synthetase | | Anticodon binding | 21 | storage and |
| | | 2)[Aeropyrum pernix] | [Aeropyrum pernix]. | | domain 2.40e−10 | | processing; Translation, |
| | | | | | :tRNA-synt_2b tRNA | | ribosomal |
| | | | | | synthetase class II | | structure and |
| | | | | | core domain (G, H, | | biogenesis; Histidyl- |
| | | | | | P, S and T) 5.80e−32 | | tRNA |
| | | | | | :hisS hisS | | synthetase |
| | | | | | histidyl-tRNA | | 5e−89 |
| | | | | | synthetase 4.40e−77 | | |
| | | | | | :hisS_second | | |
| | | | | | hisS_second | | |
| | | | | | histidyl-tRNA | | |
| | | | | | synthetase 2, | | |
| | | | | | putative 4.10e−33 | | |
| 210, | NEQ104 | hypothetical protein | conserved | 4.00E−05 | 0 | | |
| 211 | | | hypothetical protein | | | | |
| | | | [Methanococcus | | | | |
| | | | jannaschii]. | | | | |
| 212, | NEQ105 | SSU Ribosomal | Ribosomal protein | 6.00E−26 | Ribosomal_S6e Ribosomal | | Information |
| 213 | | protein S6E | S6E (S10) | | protein S6e 1.20e−23 | | storage and |
| | | (S10)[Methanopyrus | [Methanopyrus | | | | processing; Translation, |
| | | kandleri AV19]. | kandleri AV19]. | | | | ribosomal |
| | | | | | | | structure and |
| | | | | | | | biogenesis; Ribosomal |
| | | | | | | | protein S6E |
| | | | | | | | (S10) 9e−24 |
| 214, | NEQ107 | N2,N2- | hypothetical protein | 8.00E−04 | 0 | | |
| 215 | | dimethylguanosine | [Plasmodium | | | | |
| | | tRNAmethyltransferase | falciparum 3D7]. | | | | |
| | | [Aquifex aeolicus] | | | | | |
| 216, | NEQ109 | conserved | cell division protein | 2.00E−10 | eRF1_1 eRF1 domain 1 | | Poorly |
| 217 | | hypothetical | pelota (pelA), | | 8.40e−4: pelA pelA cell | | characterized; |
| | | protein [Archaeoglobus | conjectural | | division protein pelota 6.80e−3 | | General |
| | | fulgidus] | [Pyrobaculum | | | | function |
| | | | aerophilum]. | | | | prediction |
| | | | | | | | only; Predicted |
| | | | | | | | RNA- |
| | | | | | | | binding |
| | | | | | | | proteins 2e−10 |
| 218, | NEQ108 | cell division protein | N2,N2- | 4.00E−56 | TRM N2,N2- | 2.1.1. | Information |
| 219 | | pelota | dimethylguanosine | | dimethylguanosine | 32 | storage and |
| | | (pelA), conjectural | tRNA | | tRNA | | processing; Translation, |
| | | [Pyrobaculum | methyltransferase | | methyltransferase | | ribosomal |
| | | aerophilum] | [Aquifex aeolicus]. | | 1.10e−80 :TRM1 | | structure and |
| | | | | | TRM1 N2,N2- | | biogenesis; N2, |
| | | | | | dimethylguanosine | | N2- |
| | | | | | tRNA | | dimethylguanosine |
| | | | | | methyltransferase | | tRNA |
| | | | | | 1.30e−65 | | methyltransferase |
| | | | | | | | 3e−57 |
| 220, | NEQ110 | Predicted exosome | conserved | 1.00E−09 | | | Poorly |
| 221 | | subunit, | hypothetical protein | | | | characterized; |
| | | predictedexoribonuclease | [Archaeoglobus | | | | General |
| | | related to | fulgidus]. | | | | function |
| | | RNase PH | | | | | prediction |
| | | | | | | | only; Archaeal |
| | | | | | | | serine |
| | | | | | | | proteases 7e−10 |
| 222, | NEQ111 | GTP-binding protein, | conserved | 2.00E−26 | RNase_PH 3′ | 2.7.7. | Information |
| 223 | | gtp1/obg | hypothetical protein | | exoribonuclease | 56 | storage and |
| | | family[Pyrococcus | [Archaeoglobus | | family, domain 1 | | processing; Translation, |
| | | furiosus DSM 3638] | fulgidus]. | | 1.20e−12 | | ribosomal |
| | | | | | :RNase_PH_C 3′ | | structure and |
| | | | | | exoribonuclease | | biogenesis; RNase |
| | | | | | family, domain 2 | | PH- |
| | | | | | 6.30e−4 | | related |
| | | | | | | | exoribonuclease |
| | | | | | | | 1e−27 |
| 224, | NEQ112 | hypothetical protein | GTP-binding protein, | 8.00E−50 | GTP1_OBG GTP1/OBG | | Poorly |
| 225 | | [Pyrococcusfuriosus | gtp1/obg family | | family 1.70e−3 :TGS TGS | | characterized; |
| | | DSM 3638] | [Pyrococcus furiosus | | domain 1.20e−22 | | General |
| | | | DSM 3638]. | | | | function |
| | | | | | | | prediction |
| | | | | | | | only; Predicted |
| | | | | | | | GTPase 2e−49 |
| 226, | NEQ113 | hypothetical | hypothetical protein | 4.00E−06 | DUF54 Protein of unknown | | |
| | | | | | function DUF54 1.80e−3 | | |
| 227 | | nucleotidyltransferase | [Pyrococcus furiosus | | | | |
| | | [Pyrococcus | DSM 3638]. | | | | |
| | | furiosus DSM 3638] | | | | | |
| 228, | NEQ114 | Tryptophanyl-tRNA | 399aa long | 2.00E−39 | HD HD domain 3.00e−08 | | Poorly |
| 229 | | synthetase | hypothetical | | | | characterized; |
| | | (trpS) (class 1b) | interferon-gamma | | | | General |
| | | [Sulfolobus | inducible protein | | | | function |
| | | solfataricus] | [Sulfolobus tokodaii]. | | | | prediction |
| | | | | | | | only; HD |
| | | | | | | | superfamily |
| | | | | | | | phosphohydrolases |
| | | | | | | | 1e−40 |
| 230, | NEQ115 | hypothetical protein | Tryptophanyl-tRNA | 1.00E−111 | tRNA-synt_1b tRNA | 6.1.1.2 | Information |
| 231 | | | synthetase (trpS) | | synthetases class I | | storage and |
| | | | [Sulfolobus | | (W and Y) 7.10e−40 | | processing; Translation, |
| | | | solfataricus]. | | :trpS trpS | | ribosomal |
| | | | | | tryptophanyl-tRNA | | structure and |
| | | | | | synthetase 5.40e−55 | | biogenesis; Tryptophanyl- |
| | | | | | | | tRNA |
| | | | | | | | synthetase |
| | | | | | | | 1e−102 |
| 232, | NEQ116 | Predicted nucleotide | olfactory receptor 1-5 | 0.88 | 0 | | |
| 233 | | kinase related | [Takifugu rubripes]. | | | | |
| | | toCMP and AMP | | | | | |
| | | kinase | | | | | |
| | | [Methanopyrus | | | | | |
| 234, | NEQ118 | cell division inhibitor | phosphoesterase | 3.00E−04 | DHH DHH family 6.50e−07 | | |
| 235 | | minD | [Methanosarcina | | | | |
| | | homolog [Pyrococcus | acetivorans str. C2A]. | | | | |
| | | furiosus DSM 3638] | | | | | |
| 236, | NEQ117 | phosphoesterase | hypothetical protein | 3.00E−25 | SKI Shikimate kinase 2.70e−3 | | Metabolism; Nucleotide |
| 237 | | [Methanosarcinaacetivorans | [Pyrococcus | | | | transport and |
| | | str. C2A] | horikoshii]. | | | | metabolism; Predicted |
| | | | | | | | nucleotide |
| | | | | | | | kinase |
| | | | | | | | (related to |
| | | | | | | | CMP and |
| | | | | | | | AMP kinases) |
| | | | | | | | 2e−26 |
| 238, | NEQ119 | hypothetical protein | cell division inhibitor | 6.00E−36 | ArsA_ATPase Anion- | | Cellular |
| 239 | | | minD homolog | | transporting ATPase 4.50e−3 | | processes; Cell |
| | | | [Pyrococcus furiosus | | :fer4_NifH 4Fe-4S iron sulfur | | division and |
| | | | DSM 3638]. | | cluster binding proteins, | | chromosome |
| | | | | | NifH/frxC family 6.10e−3 | | partitioning; ATPases |
| | | | | | :ParA ParA family ATPase | | involved in |
| | | | | | 2.40e−17 :eps_fam eps_fam | | chromosome |
| | | | | | capsular exopolysaccharide | | partitioning |
| | | | | | family 5.90e−08 | | 3e−34 |
| 240, | NEQ120 | hypothetical protein | similar to Plasmodium | 0.83 | 0 | | |
| 241 | | | falciparum. | | | | |
| | | | Asparagine-rich | | | | |
| | | | antigen [Dictyostelium | | | | |
| | | | discoideum]. | | | | |
| 242, | NEQ121 | hypothetical protein | hypothetical protein | 4.00E−06 | 0 | | |
| 243 | | | [Plasmodium | | | | |
| | | | falciparum 3D7]. | | | | |
| 244, | NEQ123 | hypothetical protein | claustrin-chicken. | 2.00E−09 | 0 | | Information |
| 245 | | | | | | | storage and |
| | | | | | | | processing; Translation, |
| | | | | | | | ribosomal |
| | | | | | | | structure and |
| | | | | | | | biogenesis; Translation |
| | | | | | | | initiation |
| | | | | | | | factor 2 |
| | | | | | | | (GTPase) 1e−07 |
| 246, | NEQ122 | Metal-dependent | METAL DEPENDENT | 1.00E−40 | lactamase_B Metallo-beta- | | Poorly |
| 247 | | hydrolase of thebeta- | HYDROLASE | | lactamase superfamily | | characterized; |
| | | lactamase | [Pyrococcus abyssi]. | | 3.30e−07 | | General |
| | | superfamily | | | | | function |
| | | | | | | | prediction |
| | | | | | | | only; Metal- |
| | | | | | | | dependent |
| | | | | | | | hydrolases of |
| | | | | | | | the beta- |
| | | | | | | | lactamase |
| | | | | | | | superfamily I |
| | | | | | | | 1e−41 |
| 248, | NEQ124 | Queuine/archaeosine | queuine trna- | 4.00E−87 | TGT Queuine tRNA- | 2.4.2. | Information |
| 249 | | tRNA- | ribosyltransferase | | ribosyltransferase | 29 | storage and |
| | | ribosyltransferase [Methanopyrus | [Pyrococcus furiosus | | 1.20e−37 | | processing; Translation, |
| | | | DSM 3638]. | | :Q_tRNA_tgt | | ribosomal |
| | | | | | Q_tRNA_tgt | | structure and |
| | | | | | queuine tRNA- | | biogenesis; Queuine/ |
| | | | | | ribosyltransferase | | archaeosine |
| | | | | | 1.80e−10 | | tRNA- |
| | | | | | :arcsn_tRNA_tgt | | ribosyltransferase |
| | | | | | arcsn_tRNA_tgt | | 4e−86 |
| | | | | | archaeosine tRNA- | | |
| | | | | | ribosyltransferase | | |
| | | | | | 2.00e−15 | | |
| | | | | | :tgt_general | | |
| | | | | | tgt_general tRNA- | | |
| | | | | | guanine | | |
| | | | | | transglycosylases, | | |
| | | | | | various specificities | | |
| | | | | | 2.00e−60 | | |
| 250, | NEQ125 | fibrillarin-like pre- | fibrillarin-like pre- | 1.00E−65 | Fibrillarin Fibrillarin 9.60e−96 | | Information |
| 251 | | rRNA | rRNA processing | | | | storage and |
| | | processingprotein | protein [Pyrococcus | | | | processing; Translation, |
| | | [Pyrococcus | furiosus DSM 3638]. | | | | ribosomal |
| | | furiosus] | | | | | structure and |
| | | | | | | | biogenesis; Fibrillarin- |
| | | | | | | | like |
| | | | | | | | rRNA |
| | | | | | | | methylase 8e−67 |
| 252, | NEQ126 | L-asparaginase | L-asparaginase | 2.00E−70 | Asparaginase | 3.5.1.1 | Metabolism; Amino |
| 253 | | [Pyrococcushorikoshii] = GatD | [Pyrococcus | | Asparaginase | | acid |
| | | | horikoshii]. | | 7.80e−14 :asnASE_I | | transport and |
| | | | | | asnASE_I L- | | metabolism; L- |
| | | | | | asparaginases, type | | asparaginase/ |
| | | | | | I 1.40e−81 | | archaeal Glu- |
| | | | | | :asnASE_II | | tRNAGln |
| | | | | | asnASE_II L- | | amidotransferase |
| | | | | | asparaginases, type | | subunit D |
| | | | | | II 2.20e−08 | | 1e−71 |
| 254, | NEQ126a | PUTATIVE | PUTATIVE | 5.00E−25 | DUF123 Domain of | 4.2.99. | Poorly |
| 255 | | ENDONUCLEASE III | ENDONUCLEASE. | | unknown function | 18 | characterized; |
| | | [Pyrococcus abyssi] | [Pyrococcus abyssi]. | | DUF123 3.70e−33 | | Function |
| | | SPLIT see SEQ ID | | | | | unknown; Uncharacterized |
| | | NOS: 778, 779 | | | | | ACR 3e−26 |
| 256, | NEQ127 | Predicted carbamoyl | nodulation protein | 0 | CmcH_NodU | 2.—.—.— | Cellular |
| 257 | | transferase, NodU | [Methanococcus | | Carbamoyltransferase | | processes; Posttranslational |
| | | family | jannaschii]. | | 2.10e−147 | | modification, |
| | | [Methanopyrus | | | | | protein |
| | | | | | | | turnover, |
| | | | | | | | chaperones; Predicted |
| | | | | | | | carbamoyl |
| | | | | | | | transferase, |
| | | | | | | | NodU family 0 |
| 258, | NEQ128 | conserved | conserved | 2.00E−13 | 0 | | Poorly |
| 259 | | hypothetical | hypothetical protein | | | | characterized; |
| | | protein[Thermotoga | [Thermotoga | | | | General |
| | | maritima] | maritima]. | | | | function |
| | | | | | | | prediction |
| | | | | | | | only; Uncharacterized |
| | | | | | | | proteins of |
| | | | | | | | the AP |
| | | | | | | | superfamily |
| | | | | | | | 2e−14 |
| 260, | NEQ130 | translation initiation | translation initiation | 1.00E−14 | eIF-1a Eukaryotic initiation | | Information |
| 261 | | factor aIF- | factor aIF-1A | | factor 1A 2.00e−14 :eIF-1A | | storage and |
| | | 1A [Methanococcus | [Methanococcus | | eIF-1A translation initiation | | processing; Translation, |
| | | jannaschii] | jannaschii]. | | factor eIF-1A 7.40e−18 | | ribosomal |
| | | | | | | | structure and |
| | | | | | | | biogenesis; Translation |
| | | | | | | | initiation |
| | | | | | | | factor IF-1 8e−16 |
| 262, | NEQ129 | Predicted membrane | hypothetical protein | 7.00E−18 | UPF0051 Uncharacterized | | Poorly |
| 263 | | components ofan | [Desulfovibrio | | protein family (UPF0051) | | characterized; |
| | | uncharacterized iron- | desulfuricans G20]. | | 1.60e−07 | | General |
| | | regulated | | | | | function |
| | | | | | | | prediction |
| | | | | | | | only; Predicted |
| | | | | | | | membrane |
| | | | | | | | components |
| | | | | | | | of an |
| | | | | | | | uncharacterized |
| | | | | | | | iron- |
| | | | | | | | regulated |
| | | | | | | | ABC-type |
| | | | | | | | transporter |
| | | | | | | | SufB 9e−16 |
| 264, | NEQ131 | Predicted RNA- | conserved | 5.00E−43 | Translin Translin family | | Information |
| 265 | | binding protein of | hypothetical protein | | 3.70e−09 | | storage and |
| | | thetranslin family [M kandleri] | [Pyrobaculum | | | | processing; DNA |
| | | | aerophilum]. | | | | replication, |
| | | | | | | | recombination |
| | | | | | | | and |
| | | | | | | | repair; Translin |
| | | | | | | | (RNA- |
| | | | | | | | binding |
| | | | | | | | protein, |
| | | | | | | | recombination |
| | | | | | | | hotspot |
| | | | | | | | binding in |
| | | | | | | | eukaryotes) |
| | | | | | | | 1e−16 |
| 266, | NEQ133 | cell division protein | cell division protein | 1.00E−102 | tubulin Tubulin/FtsZ | 3.4.24.— | Cellular |
| 267 | | FtsZ | FtsZ [Pyrococcushorikoshii]. | | family, GTPase | | processes; Cell |
| | | [Pyrococcushorikoshii] | | | domain 2.40e−77 | | division and |
| | | | | | :ftsZ ftsZ cell | | chromosome |
| | | | | | division protein FtsZ | | partitioning; Cell |
| | | | | | 1.20e−125 | | division |
| | | | | | :tubulin_C | | GTPase 1e−103 |
| | | | | | Tubulin/FtsZ family, | | |
| | | | | | C-terminal domain | | |
| | | | | | 2.90e−16 | | |
| 268, | NEQ132 | hypothetical protein | RNA polymerase | 2.6 | 0 | | |
| 269 | | | beta-prime subunit | | | | |
| | | | [Candidatus | | | | |
| | | | Carsonella ruddii]. | | | | |
| 270, | NEQ134 | hypothetical protein | hypothetical protein | 1 | 0 | | |
| 271 | | | [Plasmodium yoelii | | | | |
| | | | yoelii]. | | | | |
| 272, | NEQ135 | hypothetical protein | unknown protein- | 3.00E−03 | 0 | | |
| 273 | | | related [Plasmodium | | | | |
| | | | yoelii yoelii]. | | | | |
| 274, | NEQ136 | hypothetical protein | putative retroelement | 2.4 | 0 | | |
| 275 | | | pol polyprotein | | | | |
| | | | [Arabidopsis thaliana]. | | | | |
| 276, | NEQ139 | hypothetical protein | hypothetical protein | 0.01 | 0 | | |
| 277 | | | [Plasmodium | | | | |
| | | | falciparum 3D7]. | | | | |
| 278, | NEQ139 | hypothetical protein | ymf77 [Tetrahymena | 2.00E−06 | 0 | | |
| 279 | | | thermophila]. | | | | |
| 280, | NEQ138 | hypothetical protein | 521aa long | 0.05 | 0 | | |
| 281 | | | hypothetical protein | | | | |
| | | | [Sulfolobus tokodaii]. | | | | |
| 282, | NEQ140 | hypothetical protein | ORF MSV156 | 2.00E−03 | 0 | | |
| 283 | | | hypothetical protein | | | | |
| | | | [Melanoplus | | | | |
| | | | sanguinipes | | | | |
| | | | entomopoxvirus]. | | | | |
| 284, | NEQ141 | HSP60 family | HSP60 family | 0 | cpn60_TCP1 TCP- | 2.7.1. | Cellular |
| 285 | | chaperonin[Methanopyrus | chaperonin | | 1/cpn60 chaperonin | 68 | processes; Posttranslational |
| | | kandleri AV19] | [Methanopyrus | | family 4.30e−219 | | modification, |
| | | | kandleri AV19]. | | | | protein |
| | | | | | | | turnover, |
| | | | | | | | chaperones; Chaperonin |
| | | | | | | | GroEL |
| | | | | | | | (HSP60 |
| | | | | | | | family) 0 |
| 286, | NEQ144 | DNA topoisomerase | DNA topoisomerase | 1.00E−107 | HATPase_c | 5.99. | Information |
| 287 | | VI, subunit B (top6B) | VI, subunit B (top6B) | | Histidine kinase-, | 1.3 | storage and |
| | | [Archaeoglobus | [Archaeoglobus | | DNA gyrase B-, and | | processing; DNA |
| | | fulgidus] | fulgidus]. | | HSP90-like ATPase | | replication, |
| | | | | | 3.70e−11 :top6b | | recombination |
| | | | | | top6b DNA | | and |
| | | | | | topoisomerase VI, B | | repair; DNA |
| | | | | | subunit 7.80e−160 | | topoisomerase |
| | | | | | | | VI, subunit |
| | | | | | | | B 1e−108 |
| 288, | NEQ143 | Predicted | 165aa long conserved | 4.00E−18 | HTH_3 Helix-turn-helix | | Information |
| 289 | | transcription | hypothetical protein | | 4.00e−16 :TIGR00270 | | storage and |
| | | factor, homolog of | [Sulfolobus tokodaii]. | | TIGR00270 conserved | | processing; Transcription; |
| | | eukaryotic MBF1 [M. | | | hypothetical protein | | Predicted |
| | | | | | TIGR00270 1.10e−15 | | transcription |
| | | | | | | | factor, |
| | | | | | | | homolog of |
| | | | | | | | eukaryotic |
| | | | | | | | MBF1 5e−17 |
| 290, | NEQ146 | LSU Ribosomal | Ribosomal protein L4 | 2.00E−55 | Ribosomal_L4 Ribosomal | | Information |
| 291 | | protein | [Methanopyrus | | protein L4/L1 family 4.60e−69 | | storage and |
| | | L4 [Methanopyrus | kandleri AV19]. | | | | processing; Translation, |
| | | kandleri AV19] | | | | | ribosomal |
| | | | | | | | structure and |
| | | | | | | | biogenesis; Ribosomal |
| | | | | | | | protein L4 1e−52 |
| 292, | NEQ145 | hypothetical protein | hypothetical protein | 0.36 | 0 | | |
| 293 | | | [Clostridium | | | | |
| | | | thermocellum ATCC | | | | |
| | | | 27405]. | | | | |
| 294, | NEQ147 | conserved | conserved | 7.00E−35 | UPF0047 Uncharacterised | | Poorly |
| 295 | | hypothetical | hypothetical protein | | protein family UPF0047 | | characterized; |
| | | protein [Archaeoglobus | [Archaeoglobus | | 2.40e−48 :TIGR00149 | | Function |
| | | fulgidus] | fulgidus]. | | TIGR00149 conserved | | unknown; Uncharacterized |
| | | | | | hypothetical protein | | ACR 4e−36 |
| | | | | | TIGR00149 3.30e−34 | | |
| 296, | NEQ148 | Fe—S oxidoreductase | hypothetical protein | 1.00E−163 | B12-binding B12 | 1.97. | Metabolism; Energy |
| 297 | | family | [Pyrococcus | | binding domain | 1.4 | production |
| | | protein [Methanopyrus | horikoshii]. | | 8.90e−19 | | and |
| | | kandleri AV19] | | | :TIGR00089 | | conversion; Fe—S |
| | | | | | TIGR00089 | | oxidoreductases |
| | | | | | conserved | | family 2 |
| | | | | | hypothetical protein | | 1e−164 |
| | | | | | 2.10e−06 | | |
| | | | | | :Radical_SAM | | |
| | | | | | Radical SAM | | |
| | | | | | superfamily 2.00e−26 | | |
| 298, | NEQ150 | DNA-binding protein | hypothetical protein | 2.00E−07 | DUF122 Protein of unknown | | Poorly |
| 299 | | [Aeropyrumpernix] | [Pyrococcus | | function DUF122 1.20e−05 | | characterized; |
| | | | horikoshii]. | | | | General |
| | | | | | | | function |
| | | | | | | | prediction |
| | | | | | | | only; DNA- |
| | | | | | | | binding |
| | | | | | | | protein 1e−08 |
| 300, | NEQ149 | adenylate kinase | adenylate kinase | 2.00E−12 | | 2.7.4.3 | Metabolism; Nucleotide |
| 301 | | (ATP- | (ATP-AMP | | | | transport and |
| | | AMPtransphosphorylase) | transphosphorylase) | | | | metabolism; Archaeal |
| | | [Pyrococcus | [Pyrococcus furiosus | | | | adenylate |
| | | | DSM 3638]. | | | | kinase 2e−13 |
| 302, | NEQ151 | hypothetical protein | AotM [Aeromonas | 0.11 | 0 | | |
| 303 | | | hydrophila]. | | | | |
| 304, | NEQ152 | tRNA | 413aa long | 4.00E−32 | NTP_transf_2 | 2.7.7. | Information |
| 305 | | nucleotidyltransferase | hypothetical tRNA | | Nucleotidyltransferase | 25 | storage and |
| | | (tRNAadenylyltransferase) | nucleotidyltransferase | | domain 5.80e−06 | | processing; Translation, |
| | | (tRNA CCA- | [Sulfolobus tokodaii]. | | | | ribosomal |
| | | pyrophosphorylase) | | | | | structure and |
| | | | | | | | biogenesis; tRNA |
| | | | | | | | nucleotidyltransferase |
| | | | | | | | (CCA-adding |
| | | | | | | | enzyme) 4e−31 |
| 306, | NEQ153 | hypothetical protein | hypothetical protein | 0.06 | 0 | | |
| 307 | | | [Mycoplasma | | | | |
| | | | pneumoniae]. | | | | |
| 308, | NEQ154 | hypothetical protein | RKST1. | 0.07 | 0 | | |
| 309 | | | | | | | |
| 310, | NEQ155 | oligosaccharyl | hypothetical protein | 6.00E−16 | 0 | | Poorly |
| 311 | | transferase stt3 | [Pyrococcus | | | | characterized; |
| | | subunitrelated | horikoshii]. | | | | General |
| | | protein [P. furiosus] | | | | | function |
| | | | | | | | prediction |
| | | | | | | | only; Uncharacterized |
| | | | | | | | membrane |
| | | | | | | | protein, |
| | | | | | | | required for |
| | | | | | | | N-linked |
| | | | | | | | glycosylation |
| | | | | | | | 4e−17 |
| 312, | NEQ156 | DNA-directed RNA | DNA-directed RNA | 0 | RNA_pol_Rpb2_6 | 2.7.7.6 | Information |
| 313 | | polymerase, subunit | polymerase, subunit B | | RNA polymerase | | storage and |
| | | B′ (rpoB1) [M. jannaschii] | [Pyrococcus abyssi]. | | Rpb2, domain 6 | | processing; Transcription; |
| | | | | | 1.90e−158 | | DNA- |
| | | | | | :RNA_pol_Rpb2_7 | | directed |
| | | | | | RNA polymerase | | RNA |
| | | | | | Rpb2, domain 7 | | polymerase |
| | | | | | 3.50e−31 | | beta |
| | | | | | :RNA_pol_Rpb2_4 | | subunit/140 kD |
| | | | | | RNA polymerase | | subunit |
| | | | | | Rpb2, domain 4 | | (split gene in |
| | | | | | 1.40e−30 | | Mjan, Mthe, |
| | | | | | :RNA_pol_Rpb2_5 | | Aful) 0 |
| | | | | | RNA polymerase | | |
| | | | | | Rpb2, domain 5 | | |
| | | | | | 7.10e−17 | | |
| 314, | NEQ157 | GTP-binding protein, | hypothetical protein | 4.00E−44 | MMR_HSR1 GTPase of | | Poorly |
| 315 | | GTP1/OBG- | [Pyrococcus | | unknown function 5.40e−05 | | characterized; |
| | | family [Archaeoglobus | horikoshii]. | | :small_GTP small_GTP | | General |
| | | fulgidus] | | | small GTP-binding protein | | function |
| | | | | | domain 1.10e−08 | | prediction |
| | | | | | | | only; Predicted |
| | | | | | | | GTPase 3e−45 |
| 316, | NEQ158 | conserved | hypothetical protein | 2.00E−41 | DUF437 Protein of unknown | | Poorly |
| 317 | | hypothetical | [Pyrococcus furiosus | | function (DUF437) 4.90e−27 | | characterized; |
| | | protein [Pyrococcus | DSM 3638]. | | | | Function |
| | | horikoshii] | | | | | unknown; Uncharacterized |
| | | | | | | | ACR 1e−41 |
| 318, | NEQ159 | Predicted | 149aa long conserved | 1.00E−19 | PBP | | Poorly |
| 319 | | phospholipid- | hypothetical protein | | Phosphatidylethanolamine- | | characterized; |
| | | bindingprotein | [Sulfolobus tokodaii]. | | binding protein 7.60e−07 | | General |
| | | [Thermoplasma | | | :TIGR00481 TIGR00481 | | function |
| | | volcanium] | | | conserved hypothetical | | prediction |
| | | | | | protein TIGR00481 8.10e−13 | | only; Phospholipid- |
| | | | | | | | binding |
| | | | | | | | protein 4e−18 |
| 320, | NEQ160 | hypothetical protein | M. jannaschii | 0.01 | 0 | | |
| 321 | | | predicted coding | | | | |
| | | | region MJ0793 | | | | |
| | | | [Methanococcus | | | | |
| | | | jannaschii]. | | | | |
| 322, | NEQ162 | conserved putative | hypothetical protein | 6.00E−29 | UPF0118 Domain of | | Poorly |
| 323 | | membrane | [Aquifex aeolicus]. | | unknown function DUF20 | | characterized; |
| | | protein, possibly a | | | 4.90e−38 | | General |
| | | permease [P. abyssi] | | | | | function |
| | | | | | | | prediction |
| | | | | | | | only; Predicted |
| | | | | | | | permease |
| | | | | | | | 4e−30 |
| 324, | NEQ161 | hypothetical protein | hypothetical protein | 2.00E−06 | 0 | | |
| 325 | | | [Plasmodium yoelii | | | | |
| | | | yoelii]. | | | | |
| 326, | NEQ163 | hypothetical protein | EVM140 (Ectromelia | 1.2 | 0 | | |
| 327 | | | virus]. | | | | |
| 328, | NEQ164 | hypothetical | asoB protein | 8.00E−04 | 0 | | |
| 329 | | protein maybe | [Methanococcus | | | | |
| | | membran protein | jannaschii]. | | | | |
| 330, | NEQ165 | Predicted RNA | hypothetical protein | 8.00E−21 | GidB Glucose | 2.1.1.— | Information |
| 331 | | methylase[Methanopyrus | [Pyrococcus furiosus | | inhibited division | | storage and |
| | | kandleri AV19] | DSM 3638]. | | protein 5.30e−3 | | processing; Translation, |
| | | | | | :gidB gidB glucose- | | ribosomal |
| | | | | | inhibited division | | structure and |
| | | | | | protein B 5.50e−05 | | biogenesis; Predicted |
| | | | | | | | RNA |
| | | | | | | | methylase 6e−20 |
| 332, | NEQ166 | H(+)-transporting | H(+)-transporting ATP | 2.00E−15 | ATP-synt_D ATP | 3.6.3. | Metabolism; Energy |
| 333 | | ATP synthasesubunit | synthase subunit D | | synthase subunit D | 14 | production |
| | | D (V-type ATPase | [Pyrococcus | | 1.60e−09 | | and |
| | | subunit D) | horikoshii]. | | :V_ATPase_subD | | conversion; Archaeal/ |
| | | | | | V_ATPase_subD | | vacuolar- |
| | | | | | V-type ATPase, | | type H+- |
| | | | | | subunit D 1.90e−18 | | ATPase |
| | | | | | | | subunit D 2e−16 |
| 334, | NEQ168 | Preprotein | Preprotein | 9.00E−60 | secY eubacterial secY | | Cellular |
| 335 | | translocase subunit | translocase subunit | | protein 9.90e−09 | | processes; Cell |
| | | SecY[Methanopyrus | SecY [Methanopyrus | | :3a0501s007 3a0501s007 | | motility and |
| | | kandleri AV19] | kandleri AV19]. | | preprotein translocase, SecY | | secretion; Preprotein |
| | | | | | subunit 1.20e−15 | | translocase |
| | | | | | | | subunit SecY |
| | | | | | | | 8e−61 |
| 336, | NEQ170 | activator 1, | activator 1, replication | 1.00E−102 | AAA ATPase family | 2.7.7.7 | Information |
| 337 | | replication factor C, | factor C, 35 KD | | associated with | | storage and |
| | | 35 KD subunit | subunit | | various cellular | | processing; DNA |
| | | [Archaeoglobus | [Archaeoglobus | | activities (AAA) | | replication, |
| | | fulgidus] | fulgidus]. | | 1.30e−15 :ruvB ruvB | | recombination |
| | | | | | Holliday junction | | and |
| | | | | | DNA helicase RuvB | | repair; ATPase |
| | | | | | 5.50e−3 :holB holB | | involved in |
| | | | | | DNA polymerase III, | | DNA |
| | | | | | delta prime subunit | | replication 1e−103 |
| | | | | | 1.00e−3 | | |
| 338, | NEQ169 | type II secretion | type II secretion | 1.00E−104 | GSPII_E Type II/IV secretion | | Cellular |
| 339 | | system protein(gspE- | system protein (gspE- | | system protein 7.10e−06 | | processes; Cell |
| | | 1) [Archaeoglobus | 1) [Archaeoglobus | | | | motility and |
| | | fulgidus] | fulgidus]. | | | | secretion; Type |
| | | | | | | | IV secretory |
| | | | | | | | pathway, |
| | | | | | | | VirB11 |
| | | | | | | | components, |
| | | | | | | | and related |
| | | | | | | | ATPases |
| | | | | | | | involved in |
| | | | | | | | archaeal |
| | | | | | | | flagella |
| | | | | | | | biosynthesis |
| | | | | | | | 1e−106 |
| 340, | NEQ171 | hypothetical protein | similar to Plasmodium | 3.00E−05 | 0 | | |
| 341 | | | falciparum. | | | | |
| | | | Hypothetical protein | | | | |
| | | | [Dictyostelium | | | | |
| | | | discoideum]. | | | | |
| 342, | NEQ173 | DNA-directed RNA | DNA-DIRECTED RNA | 8.00E−96 | RNA_pol_Rpb2_2 | 2.7.7.6 | Information |
| 343 | | polymerase, subunit | POLYMERASE | | RNA polymerase | | storage and |
| | | B″ (rpoB2) [M. jannaschii] | SUBUNIT B. | | Rpb2, domain 2 | | processing; Transcription; |
| | | | | | 3.50e−07 | | DNA- |
| | | | | | :RNA_pol_Rpb2_1 | | directed |
| | | | | | RNA polymerase | | RNA |
| | | | | | beta subunit 5.50e−33 | | polymerase |
| | | | | | :RNA_pol_Rpb2_3 | | beta |
| | | | | | RNA polymerase | | subunit/140 kD |
| | | | | | Rpb2, domain 3 | | subunit |
| | | | | | 4.60e−21 | | (split gene in |
| | | | | | | | Mjan, Mthe, |
| | | | | | | | Aful) 1e−94 |
| 344, | NEQ172 | {putative | Eps7F [Streptococcus | 2.00E−12 | Glycos_transf_2 Glycosyl | | Cellular |
| 345 | | glycosyltransferase} | thermophilus]. | | transferase 2.50e−24 | | processes; Cell |
| | | | | | | | envelope |
| | | | | | | | biogenesis, |
| | | | | | | | outer |
| | | | | | | | membrane; Glycosyltransferases |
| | | | | | | | involved |
| | | | | | | | in cell wall |
| | | | | | | | biogenesis |
| | | | | | | | 3e−12 |
| 346, | NEQ175 | ABC-type transport | hypothetical protein | 1.00E−60 | DUF214 Predicted | | Poorly |
| 347 | | systems, involvedin | [Methanococcus | | permease 1.30e−33 | | characterized; |
| | | lipoprotein release, | jannaschii]. | | | | General |
| | | permease | | | | | function |
| | | | | | | | prediction |
| | | | | | | | only; ABC- |
| | | | | | | | type transport |
| | | | | | | | systems, |
| | | | | | | | involved in |
| | | | | | | | lipoprotein |
| | | | | | | | release, |
| | | | | | | | permease |
| | | | | | | | components |
| | | | | | | | 7e−62 |
| 348, | NEQ174 | RecA-superfamily | hypothetical protein | 1.00E−96 | | | Cellular |
| 349 | | ATPase implicatedin | [Pyrococcus | | | | processes; Signal |
| | | signal transduction | horikoshii]. | | | | transduction |
| | | [Mp. kandleri] | | | | | mechanisms; |
| | | | | | | | RecA- |
| | | | | | | | superfamily |
| | | | | | | | ATPases |
| | | | | | | | implicated in |
| | | | | | | | signal |
| | | | | | | | transduction |
| | | | | | | | 1e−97 |
| 350, | NEQ176 | SSU ribosomal | SSU ribosomal | 9.00E−16 | Ribosomal_S27 Ribosomal | | Information |
| 351 | | protein | protein S27AE; | | protein S27a 4.10e−21 | | storage and |
| | | S27AE; (rps27AE) | (rps27AE) | | | | processing; Translation, |
| | | [Pyrococcus | [Pyrococcus furiosus | | | | ribosomal |
| | | furiosus] | DSM 3638]. | | | | structure and |
| | | | | | | | biogenesis; Ribosomal |
| | | | | | | | protein |
| | | | | | | | S27AE 5e−16 |
| 352, | NEQ177 | threonyl-tRNA | threonyl-tRNA | 1.00E−151 | HGTP_anticodon | 6.1.1.3 | Information |
| 353 | | synthetase (class | synthetase | | Anticodon binding | | storage and |
| | | 2)[Pyrobaculum | [Pyrobaculum | | domain 1.20e−37 | | processing; Translation, |
| | | aerophilum] | aerophilum]. | | :tRNA-synt_2b tRNA | | ribosomal |
| | | | | | synthetase class II | | structure and |
| | | | | | core domain (G, H, | | biogenesis; Threonyl- |
| | | | | | P, S and T) 2.10e−06 | | tRNA |
| | | | | | :glyS_dimeric | | synthetase |
| | | | | | glyS_dimeric glycyl- | | 1e−108 |
| | | | | | tRNA synthetase | | |
| | | | | | 1.30e−3 :proS_fam_l | | |
| | | | | | proS_fam_l prolyl- | | |
| | | | | | tRNA synthetase | | |
| | | | | | 3.00e−4 :thrS thrS | | |
| | | | | | threonyl-tRNA | | |
| | | | | | synthetase 5.10e−50 | | |
| 354, | NEQ178 | LSU ribosomal | LSU ribosomal protein | 6.00E−20 | KOW KOW motif 2.80e−05 | | Information |
| 355 | | protein | L14E [Methanococcus | | | | storage and |
| | | L14E[Methanococcus | jannaschii]. | | | | processing; Translation, |
| | | jannaschii]. | | | | | ribosomal |
| | | | | | | | structure and |
| | | | | | | | biogenesis; Ribosomal |
| | | | | | | | protein L14E |
| | | | | | | | 3e−21 |
| 356, | NEQ179 | LSU ribosomal | LSU ribosomal protein | 2.00E−13 | Ribosomal_L7Ae Ribosomal | | Information |
| 357 | | protein | L30E [Methanococcus | | protein | | storage and |
| | | L30E[Methanococcus | jannaschii]. | | L7Ae/L30e/S12e/Gadd45 | | processing; Translation, |
| | | jannaschii] | | | family 1.80e−10 | | ribosomal |
| | | | | | | | structure and |
| | | | | | | | biogenesis; Ribosomal |
| | | | | | | | protein L30E |
| | | | | | | | 9e−15 |
| 358, | NEQ180 | transcription | NUSA PROTEIN | 6.00E−09 | 0 | | Information |
| 359 | | termination factor | HOMOLOG. | | | | storage and |
| | | nusA- | | | | | processing; Transcription; |
| | | Methanococcus | | | | | Transcription |
| | | vannielii | | | | | elongation |
| | | | | | | | factor 2e−08 |
| 360, | NEQ182 | DNA-directed RNA | DNA-DIRECTED RNA | 1.00E−10 | RNA_pool_L RNA | 2.7.7.6 | Information |
| 361 | | polymerasesubunit L | POLYMERASE | | polymerases L/13 | | storage and |
| | | [Sulfolobus | SUBUNIT L. | | to 16 kDa subunit | | processing; Transcription; |
| | | acidocaldarius] | | | 2.90e−12 | | DNA- |
| | | | | | | | directed |
| | | | | | | | RNA |
| | | | | | | | polymerase, |
| | | | | | | | subunit L 2e−08 |
| 362, | NEQ181 | LSU ribosomal | LSU ribosomal protein | 2.00E−58 | Ribosomal_L15e Ribosomal | | Information |
| 363 | | protein | L15E; (rpl15E) | | L15 1.60e−78 | | storage and |
| | | L15E; (rpl15E) | [Pyrococcus furiosus | | | | processing; Translation, |
| | | [Pyrococcus | DSM 3638]. | | | | ribosomal |
| | | furiosus] | | | | | structure and |
| | | | | | | | biogenesis; Ribosomal |
| | | | | | | | protein L15E |
| | | | | | | | 9e−59 |
| 364, | NEQ183 | LSU ribosomal | 50S ribosomal protein | 4.00E−16 | Ribosomal_L44 Ribosomal | | Information |
| 365 | | protein | L44 related protein | | protein L44 2.00e−11 | | storage and |
| | | L44E; (rpl44E) | [Thermoplasma | | | | processing; Translation, |
| | | [Pyrococcus | acidophilum]. | | | | ribosomal |
| | | furiosus] | | | | | structure and |
| | | | | | | | biogenesis; Ribosomal |
| | | | | | | | protein L44E |
| | | | | | | | 2e−17 |
| 366, | NEQ184 | Predicted exosome | conserved | 1.00E−23 | KH KH domain 2.00e−06 | | Information |
| 367 | | subunit, RNA- | hypothetical protein | | | | storage and |
| | | bindingprotein Rrp4 | [Archaeoglobus | | | | processing; Translation, |
| | | (contain S1 | fulgidus]. | | | | ribosomal |
| | | | | | | | structure and |
| | | | | | | | biogenesis; RNA- |
| | | | | | | | binding |
| | | | | | | | protein Rrp4 |
| | | | | | | | and related |
| | | | | | | | proteins |
| | | | | | | | (contain S1 |
| | | | | | | | domain and |
| | | | | | | | KH domain) |
| | | | | | | | 7e−25 |
| 368, | NEQ185 | Glu-tRNA | Aspartyl/glutamyl- | 1.00E−77 | DUF186 GatB/Yqey | 6.3.5.— | Information |
| 369 | | amidotransferase, | tRNA(Asn/Gln) | | domain 4.40e−4 | | storage and |
| | | subunitB (gatB-2) | amidotransferase | | :GatB_N PET112 | | processing; Translation, |
| | | [Archaeoglobus | subunit B (Asp/Glu- | | family, N terminal | | ribosomal |
| | | fulgidus] | ADT subunit B). | | region 5.40e−106 | | structure and |
| | | | | | :gatB gatB | | biogenesis; Asp- |
| | | | | | glutamyl-tRNA(Gln) | | tRNAAsn/Glu- |
| | | | | | amidotransferase, B | | tRNAGln |
| | | | | | subunit 4.40e−104 | | amidotransferase |
| | | | | | :gatB_rel gatB_rel | | B subunit |
| | | | | | aspartyl-tRNA(Asn) | | (PET112 |
| | | | | | amidotransferase, B | | homolog) 7e−79 |
| | | | | | subunit, putative | | |
| | | | | | 1.10e−23 :gatB_rel | | |
| | | | | | gatB_rel aspartyl- | | |
| | | | | | tRNA(Asn) | | |
| | | | | | amidotransferase, B | | |
| | | | | | subunit, putative | | |
| | | | | | 5.00e−4 :gatB_rel | | |
| | | | | | gatB_rel aspartyl- | | |
| | | | | | tRNA(Asn) | | |
| | | | | | amidotransferase, B | | |
| | | | | | subunit, putative | | |
| | | | | | 3.80e−3 | | |
| 370, | NEQ186 | ATP-dependent 26S | Proteasome-activating | 1.00E−111 | AAA ATPase family | 3.6.1.3 | Cellular |
| 371 | | proteasomeregulatory | nucleotidase | | associated with | | processes; Posttranslational |
| | | subunit [M. kandleri | (Proteasome | | various cellular | | modification, |
| | | | regulatory subunit). | | activities (AAA) | | protein |
| | | | | | 8.10e−89 :FtsH_fam | | turnover, |
| | | | | | FtsH_fam ATP- | | chaperones; ATP- |
| | | | | | dependent | | dependent |
| | | | | | metalloprotease | | 26S |
| | | | | | FtsH 4.70e−21 | | proteasome |
| | | | | | :26Sp45 26Sp45 | | regulatory |
| | | | | | 26S proteasome | | subunit 1e−107 |
| | | | | | subunit P45 family | | |
| | | | | | 7.10e−182 | | |
| 372, | NEQ188 | hypothetical protein | rubrerythrin (rr1) | 0.04 | 0 | | |
| 373 | | | [Archaeoglobus | | | | |
| | | | fulgidus]. | | | | |
| 374, | NEQ187 | SSU ribosomal | SSU ribosomal | 3.00E−37 | Ribosomal_S19e Ribosomal | | Information |
| 375 | | protein | protein S19E; | | protein S19e 9.00e−45 | | storage and |
| | | S19E; (rps19E) | (rps19E) [Pyrococcus | | | | processing; Translation, |
| | | [Pyrococcus | furiosus DSM 3638]. | | | | ribosomal |
| | | furiosus] | | | | | structure and |
| | | | | | | | biogenesis; Ribosomal |
| | | | | | | | protein S19E |
| | | | | | | | (S16A) 5e−38 |
| 376, | NEQ190 | branched-chain | branched-chain amino | 3.00E−68 | aminotran_4 | 2.6.1. | Metabolism; Amino |
| 377 | | amino | acid aminotransferase | | Aminotransferase | 42 | acid |
| | | acidaminotransferase | (ilvE) [Pyrobaculum | | class IV 5.60e−72 | | transport and |
| | | (ilvE) [Pb | aerophilum]. | | :D_amino_aminoT | | metabolism; Branched- |
| | | | | | D_amino_aminoT | | chain amino |
| | | | | | D-amino acid | | acid |
| | | | | | aminotransferase | | aminotransferase/ |
| | | | | | 6.10e−11 :ilvE_I | | 4-amino- |
| | | | | | ilvE_I branched- | | 4- |
| | | | | | chain amino acid | | deoxychorismate |
| | | | | | aminotransferase | | lyase 1e−62 |
| | | | | | 3.20e−107 :ilvE_II | | |
| | | | | | ilvE_II branched- | | |
| | | | | | chain amino acid | | |
| | | | | | aminotransferase | | |
| | | | | | 2.20e−21 | | |
| 378, | NEQ189 | hemolysin-related | probable hemolysin- | 8.00E−31 | CBS CBS domain 1.00e−05 | | Cellular |
| 379 | | protein[Thermotoga maritima] | related protein | | :DUF21 Domain of unknown | | processes; Cell |
| | | | [Clostridium | | function DUF21 3.90e−16 | | motility and |
| | | | perfringens]. | | :CorC_HlyC Transporter | | secretion; Hemolysins |
| | | | | | associated domain 3.90e−14 | | and |
| | | | | | | | related |
| | | | | | | | proteins |
| | | | | | | | containing |
| | | | | | | | CBS domains |
| | | | | | | | 7e−31 |
| 380, | NEQ191 | alkyl hydroperoxide | alkyl hydroperoxide | 3.00E−90 | AhpC-TSA | 1.6.4.— | Cellular |
| 381 | | reductase[Methanococcus | reductase | | AhpC/TSA family | | processes; Posttranslational |
| | | jannaschii] | [Methanococcus | | 2.40e−39 | | modification, |
| | | | jannaschii]. | | | | protein |
| | | | | | | | turnover, |
| | | | | | | | chaperones; Peroxiredoxin |
| | | | | | | | 2e−91 |
| 382, | NEQ193 | hypothetical protein | hypothetical protein | 0.12 | 0 | | |
| 383 | | | [Clostridium | | | | |
| | | | thermocellum ATCC | | | | |
| | | | 27405]. | | | | |
| 384, | NEQ192 | chorismate | chorismate | 2.00E−87 | ACT ACT domain | 4.2.1. | Metabolism; Amino |
| 385 | | mutase/prephenatedehydratase | mutase/prephenate | | 1.30e−10 | 51 | acid |
| | | (pheA) | dehydratase (pheA) | | :Chorismate_mut | | transport and |
| | | [A. fulgidus] | [Archaeoglobus | | Chorismate mutase | | metabolism; Prephenate |
| | | | fulgidus]. | | 1.50e−06 :PDH | | dehydratase |
| | | | | | Prephenate | | 9e−54 |
| | | | | | dehydrogenase | | |
| | | | | | 3.10e−05 :PDT | | |
| | | | | | Prephenate | | |
| | | | | | dehydratase 2.50e−51 | | |
| 386, | NEQ195 | putative | putative | 2.00E−16 | Glycos_transf_1 | 2.4.1.— | Cellular |
| 387 | | glycosyltransferase | glycosyltransferase | | Glycosyl | | processes; Cell |
| | | [Actinobacillus | [Actinobacillus | | transferases group 1 | | envelope |
| | | | actinomycetemcomitans]. | | 1.50e−21 | | biogenesis, |
| | | | | | | | outer |
| | | | | | | | membrane; Predicted |
| | | | | | | | glycosyltransferases |
| | | | | | | | 1e−15 |
| 388, | NEQ196 | hypothetical protein | Conserved | 0.53 | 0 | | |
| 389 | | | hypothetical protein | | | | |
| | | | [Sulfolobus | | | | |
| | | | solfataricus]. | | | | |
| 390, | NEQ194 | hypothetical protein | NADH | 0.29 | 0 | | |
| 391 | | | dehydrogenase | | | | |
| | | | subunit 5 | | | | |
| | | | [Caenorhabditis | | | | |
| | | | elegans]. | | | | |
| 392, | NEQ197 | hypothetical protein | SecY-independent | 0.02 | 0 | | |
| 393 | | | transporter protein | | | | |
| | | | [Chondrus crispus]. | | | | |
| 394, | NEQ198 | putative inner | conserved | 1.00E−107 | MS_channel | | Cellular |
| 395 | | membrane protein | hypothetical protein | | Mechanosensitive ion | | processes; Cell |
| | | | [Methanococcus | | channel 1.60e−86 | | envelope |
| | | | jannaschii]. | | | | biogenesis, |
| | | | | | | | outer |
| | | | | | | | membrane; Small- |
| | | | | | | | conductance |
| | | | | | | | mechanosensitive |
| | | | | | | | channel |
| | | | | | | | 1e−108 |
| 396, | NEQ199 | replication factor A | replication factor A | 1.00E−07 | tRNA_anti OB-fold nucleic | | Information |
| 397 | | related | related protein | | acid binding domain 7.40e−10 | | storage and |
| | | protein[Methanococcus | [Methanococcus | | | | processing; DNA |
| | | jannaschii]. | jannaschii]. | | | | replication, |
| | | | | | | | recombination |
| | | | | | | | and |
| | | | | | | | repair; Replication |
| | | | | | | | factor A |
| | | | | | | | large subunit |
| | | | | | | | and related |
| | | | | | | | ssDNA- |
| | | | | | | | binding |
| | | | | | | | proteins 1e−08 |
| 398, | NEQ200 | hypothetical protein | hypothetical protein | 0.18 | 0 | | |
| 399 | | | [Plasmodium | | | | |
| | | | falciparum 3D7]. | | | | |
| 400, | NEQ201 | LSU ribosomal | LSU ribosomal protein | 1.00E−30 | 60s_ribosomal 60s Acidic | | Information |
| 401 | | protein L12A(rpl12A) | L12A [Pyrococcus | | ribosomal protein 9.80e−19 | | storage and |
| | | [Pyrococcus abyssi] | abyssi]. | | | | processing; Translation, |
| | | | | | | | ribosomal |
| | | | | | | | structure and |
| | | | | | | | biogenesis; Ribosomal |
| | | | | | | | protein |
| | | | | | | | L12E/L44/L45/ |
| | | | | | | | RPP1/RPP2 |
| | | | | | | | 6e−32 |
| 402, | NEQ204 | LSU Ribosomal | Ribosomal protein | 4.00E−22 | Ribosomal_L22 Ribosomal | | Information |
| 403 | | protein | L22 [Methanopyrus | | protein L22p/L17e 1.20e−09 | | storage and |
| | | L22[Methanopyrus | kandleri AV19]. | | :L22_arch L22_arch | | processing; Translation, |
| | | kandleri AV19] | | | ribosomal protein L22 1.20e−16 | | ribosomal |
| | | | | | | | structure and |
| | | | | | | | biogenesis; Ribosomal |
| | | | | | | | protein L22 |
| | | | | | | | 7e−17 |
| 404, | NEQ203 | proteasome, subunit | proteasome, subunit | 1.00E−33 | proteasome | 3.4.25.1 | Cellular |
| 405 | | beta | beta (psmB) | | Proteasome A-type | | processes; Posttranslational |
| | | (psmB)(Multicatalytic | [Methanococcus | | and B-type 6.80e−44 | | modification, |
| | | endopeptidase | jannaschii]. | | | | protein |
| | | | | | | | turnover, |
| | | | | | | | chaperones; Proteasome |
| | | | | | | | protease |
| | | | | | | | subunit 9e−35 |
| 406, | NEQ205 | tRNA intron | Chain A, Crystal | 4.00E−21 | tRNA_int_endo | 3.1.27.9 | Information |
| 407 | | endonuclease | Structure Of The Trna | | tRNA intron | | storage and |
| | | (endA) [M. jannaschii] | Splicing | | endonuclease, | | processing; Translation, |
| | | | Endonuclease From | | catalytic C-terminal | | ribosomal |
| | | | Methanococcus | | domain 7.00e−19 | | structure and |
| | | | Jannaschii. | | :endA endA tRNA | | biogenesis; tRNA |
| | | | | | intron endonuclease | | splicing |
| | | | | | 1.20e−10 | | endonuclease |
| | | | | | | | 3e−22 |
| 408, | NEQ206 | conserved protein | conserved protein | 1.00E−20 | PUA PUA domain 2.60e−17 | | Information |
| 409 | | with predicted | with predicted RNA | | :unchar_dom_2 | | storage and |
| | | RNAbinding PUA | binding PUA domain | | unchar_dom_2 | | processing; Translation, |
| | | domain [Pb | [Pyrobaculum | | uncharacterized domain 2 | | ribosomal |
| | | aerophilum] | aerophilum]. | | 9.40e−17 | | structure and |
| | | | | | | | biogenesis; PUA |
| | | | | | | | domain |
| | | | | | | | (predicted |
| | | | | | | | RNA-binding |
| | | | | | | | domain) 1e−14 |
| 410, | NEQ208 | arginyl-tRNA | hypothetical protein | 2.00E−80 | tRNA-synt_1d tRNA | 6.1.1. | Information |
| 411 | | synthetase (class | [Lactobacillus | | synthetases class I | 19 | storage and |
| | | 1)[Streptococcus | gasseri]. | | (R) 8.70e−60 :argS | | processing; Translation, |
| | | pneumoniae TIGR4] | | | argS arginyl-tRNA | | ribosomal |
| | | | | | synthetase 4.70e−71 | | structure and |
| | | | | | | | biogenesis; Arginyl- |
| | | | | | | | tRNA |
| | | | | | | | synthetase |
| | | | | | | | 9e−71 |
| 412, | NEQ207 | LSU Ribosomal | Ribosomal protein | 5.00E−33 | Ribosomal_L13 Ribosomal | | Information |
| 413 | | protein | L13 [Methanopyrus | | protein L13 5.60e−28 | | storage and |
| | | L13[Methanopyrus | kandleri AV19]. | | :rpIM_bact rpIM_bact | | processing; Translation, |
| | | kandleri AV19] | | | ribosomal protein L13 3.60e−05 | | ribosomal |
| | | | | | :L13_A_E L13_A_E | | structure and |
| | | | | | ribosomal protein L13 6.20e−47 | | biogenesis; Ribosomal |
| | | | | | | | protein L13 |
| | | | | | | | 7e−29 |
| 414, | NEQ209 | hypothetical purine | virulent strain | 4.00E−11 | 0 | | Information |
| 415 | | NTPase [Phorikoshii] | associated lipoprotein | | | | storage and |
| | | | [Borrelia burgdorferi]. | | | | processing; DNA |
| | | | | | | | replication, |
| | | | | | | | recombination |
| | | | | | | | and |
| | | | | | | | repair; ATPase |
| | | | | | | | involved in |
| | | | | | | | DNA repair |
| | | | | | | | 4e−11 |
| 416, | NEQ210 | Prolyl-tRNA | Prolyl-tRNA | 6.00E−95 | HGTP_anticodon | 6.1.1. | Information |
| 417 | | synthetase (class | synthetase | | Anticodon binding | 15 | storage and |
| | | 2)[Methanopyrus | [Methanopyrus | | domain 7.40e−24 | | processing; Translation, |
| | | kandleri AV19] | kandleri AV19]. | | :tRNA-synt_2b tRNA | | ribosomal |
| | | | | | synthetase class II | | structure and |
| | | | | | core domain (G, H, | | biogenesis; Prolyl- |
| | | | | | P, S and T) 8.40e−33 | | tRNA |
| | | | | | :proS_fam_I | | synthetase |
| | | | | | proS_fam_I prolyl- | | 6e−62 |
| | | | | | tRNA synthetase | | |
| | | | | | 3.00e−145 | | |
| | | | | | :proS_fam_II | | |
| | | | | | proS_fam_II prolyl- | | |
| | | | | | tRNA synthetase | | |
| | | | | | 3.00e−05 | | |
| 418, | NEQ212 | Predicted nucleic | hypothetical protein | 1.00E−11 | PIN PIN domain 4.70e−3 | | Poorly |
| 419 | | acid-binding | [Pyrococcus furiosus | | | | characterized; |
| | | protein[Thermoplasma | DSM 3638]. | | | | General |
| | | volcanium] | | | | | function |
| | | | | | | | prediction |
| | | | | | | | only; Predicted |
| | | | | | | | nucleic |
| | | | | | | | acid-binding |
| | | | | | | | protein, |
| | | | | | | | consists of a |
| | | | | | | | PIN domain |
| | | | | | | | and a Zn- |
| | | | | | | | ribbon |
| | | | | | | | module 2e−12 |
| 420, | NEQ211 | alanyl-tRNA | alanyl-tRNA | 7.00E−76 | tRNA-synt_2c tRNA | 6.1.1.7 | Information |
| 421 | | synthetase | synthetase | | synthetases class II | | storage and |
| | | [Pyrococcus abyssi]. | [Pyrococcus abyssi]. | | (A) 5.90e−11 | | processing; Translation, |
| | | | | | | | ribosomal |
| | | | | | | | structure and |
| | | | | | | | biogenesis; Alanyl- |
| | | | | | | | tRNA |
| | | | | | | | synthetase |
| | | | | | | | 5e−77 |
| 422, | NEQ213 | histidine triad protein | histidine triad protein | 4.00E−18 | HIT HIT family 1.00e−11 | | Metabolism; Nucleotide |
| 423 | | (HIT familyprotein) | [Methanosarcina | | | | transport and |
| | | [Ms acetivorans] | acetivorans str. C2A]. | | | | metabolism; Diadenosine |
| | | | | | | | tetraphosphate |
| | | | | | | | (Ap4A) |
| | | | | | | | hydrolase and |
| | | | | | | | other HIT |
| | | | | | | | family |
| | | | | | | | hydrolases |
| | | | | | | | 9e−16 |
| 424, | NEQ214 | hypothetical | DNA GyrAse a- | 2.00E−03 | 0 | | |
| 425 | | proteinS-Layer | subunit, putative | | | | |
| | | domain? | [Plasmodium | | | | |
| | | | falciparum 3D7]. | | | | |
| 426, | NEQ215 | hypothetical protein | hypothetical protein | 0.08 | 0 | | |
| 427 | | | [Staphylococcus | | | | |
| | | | aureus subsp. aureus | | | | |
| | | | Mu50]. | | | | |
| 428, | NEQ216 | hypothetical protein | integral membrane | 1.00E−03 | 0 | | |
| 429 | | | protein [Plasmodium | | | | |
| | | | falciparum 3D7]. | | | | |
| 430, | NEQ217 | H+-transporting ATP | Archaeal/vacuolar- | 5.00E−11 | ATP-synt_C ATP | 3.6.3. | Metabolism; Energy |
| 431 | | synthase, subunit K | type H+-ATPase | | synthase subunit C | 14 | production |
| | | (atpK-1/atpK-2) | subunit K | | 8.70e−20 | | and |
| | | homolog - | [Methanopyrus | | :ATP_synt_c | | conversion; F0 |
| | | | kandleri AV19]. | | ATP_synt_c ATP | | F1-type ATP |
| | | | | | synthase, F0 | | synthase c |
| | | | | | subunit c 9.50e−3 | | subunit/Archaeal/ |
| | | | | | | | vacuolar- |
| | | | | | | | type H+- |
| | | | | | | | ATPase |
| | | | | | | | subunit K 4e−12 |
| 432, | NEQ218 | hypothetical protein | conserved | 0.04 | | | |
| 433 | | | hypothetical protein | | | | |
| | | | [Clostridium | | | | |
| | | | perfringens]. | | | | |
| 434, | NEQ219 | SSU ribosomal | Ribosomal protein | 1.00E−14 | Ribosomal_S27e Ribosomal | | Information |
| 435 | | protein S27E | S27E [Methanopyrus | | protein S27 7.10e−23 | | storage and |
| | | | kandleri AV19]. | | | | processing; Translation, |
| | | | | | | | ribosomal |
| | | | | | | | structure and |
| | | | | | | | biogenesis; Ribosomal |
| | | | | | | | protein S27E |
| | | | | | | | 6e−12 |
| 436, | NEQ220 | Translation | Translation elongation | 1.00E−07 | EF1BD EF-1 guanine | | Information |
| 437 | | elongation factor EF- | factor EF-1beta | | nucleotide exchange domain | | storage and |
| | | 1beta[Methanopyrus | [Methanopyrus | | 1.50e−09 :aEF-1_beta aEF- | | processing; Translation, |
| | | kandleri AV19] | kandleri AV19]. | | 1_beta translation | | ribosomal |
| | | | | | elongation factor aEF-1 beta | | structure and |
| | | | | | 6.10e−10 | | biogenesis; Translation |
| | | | | | | | elongation |
| | | | | | | | factor EF- |
| | | | | | | | 1beta 2e−08 |
| 438, | NEQ221 | hypothetical protein | hypothetical protein | 0.69 | 0 | | |
| 439 | | | T26A5.5- | | | | |
| | | | Caenorhabditis | | | | |
| | | | elegans. | | | | |
| 440, | NEQ222 | hypothetical protein | 132aa long | 0.03 | 0 | | |
| 441 | | | hypothetical protein | | | | |
| | | | [Sulfolobus tokodaii]. | | | | |
| 442, | NEQ223 | agmatinase (speB) | agmatinase (speB) | 2.00E−16 | arginase Arginase | 3.5.3. | Metabolism; Amino |
| 443 | | (agmatineureohydrolase) | [Archaeoglobus | | family 1.70e−07 | 11 | acid |
| | | [Archaeoglobus | fulgidus]. | | :hutG hutG | | transport and |
| | | | | | formiminoglutamase | | metabolism; Arginase/ |
| | | | | | 9.50e−05 | | agmatinase/ |
| | | | | | :agmatinase | | formimionoglutamate |
| | | | | | agmatinase | | hydrolase, |
| | | | | | agmatinase, | | arginase |
| | | | | | putative 4.90e−12 | | family 1e−17 |
| | | | | | 0 | | |
| 444, | NEQ224 | hypothetical protein | MYOSIN HEAVY | 0.03 | 0 | | |
| 445 | | | CHAIN | | | | |
| | | | [Encephalitozoon | | | | |
| | | | cuniculi]. | | | | |
| 446, | NEQ225 | hypothetical protein | hypothetical protein | 1.00E−03 | 0 | | |
| 447 | | | [Plasmodium | | | | |
| | | | falciparum 3D7]. | | | | |
| 448, | NEQ226 | putative diphthamide | hypothetical protein | 2.00E−31 | Diphthamide_syn Putative | | Information |
| 449 | | synthesis | [Ferroplasma | | diphthamide synthesis | | storage and |
| | | protein[Methanosarcina | acidarmanus]. | | protein 9.50e−13 :diphth2_R | | processing; Translation, |
| | | acetivorans] | | | diphth2_R diphthamide | | ribosomal |
| | | | | | biosynthesis protein 2- | | structure and |
| | | | | | related domain 9.80e−22 | | biogenesis; Diphthamide |
| | | | | | | | synthase |
| | | | | | | | subunit DPH2 |
| | | | | | | | 2e−31 |
| 450, | NEQ227 | SSU Ribosomal | SSU ribosomal | 1.00E−13 | Ribosomal_S14 Ribosomal | | Information |
| 451 | | protein S14 | protein S14AB | | protein S14p/S29e 4.30e−06 | | storage and |
| | | | (rps14AB) [Sulfolobus | | | | processing; Translation, |
| | | | solfataricus]. | | | | ribosomal |
| | | | | | | | structure and |
| | | | | | | | biogenesis; Ribosomal |
| | | | | | | | protein S14 |
| | | | | | | | 6e−14 |
| 452, | NEQ229 | transcriptional | Transcriptional | 2.00E−25 | ASNC_trans_reg AsnC | | Information |
| 453 | | regulatory | regulator Ptr2. | | family 1.30e−21 | | storage and |
| | | protein, AsnC family | | | | | processing; Transcription; |
| | | [M. jannaschii] | | | | | Transcriptional |
| | | | | | | | regulators 2e−26 |
| 454, | NEQ228 | met-10+ protein | met-10+ protein | 2.00E−32 | Met_10 Met-10+ | 2.1.1.— | Poorly |
| 455 | | [Pyrococcus | [Pyrococcus furiosus | | like-protein 4.20e−26 | | characterized; |
| | | furiosus DSM 3638] | DSM 3638]. | | | | General |
| | | | | | | | function |
| | | | | | | | prediction |
| | | | | | | | only; Predicted |
| | | | | | | | methyltransferase |
| | | | | | | | 8e−28 |
| 456, | NEQ230 | isoleucyl-tRNA | isoleucyl-tRNA | 1.00E−175 | tRNA-synt_1 tRNA | 6.1.1.5 | Information |
| 457 | | synthetase (class | synthetase | | synthetases class I | | storage and |
| | | 1a)[Pyrococcus | [Pyrococcus furiosus | | (I, L, M and V) | | processing; Translation, |
| | | furiosus DSM 3638] | DSM 3638]. | | 4.80e−188 :ileS ileS | | ribosomal |
| | | | | | isoleucyl-tRNA | | structure and |
| | | | | | synthetase 3.80e−199 | | biogenesis; Isoleucyl- |
| | | | | | :leuS_bact | | tRNA |
| | | | | | leuS_bact leucyl- | | synthetase |
| | | | | | tRNA synthetase | | 1e−175 |
| | | | | | 2.20e−05 :metG | | |
| | | | | | metG methionyl- | | |
| | | | | | tRNA synthetase | | |
| | | | | | 7.30e−07 :valS valS | | |
| | | | | | valyl-tRNA | | |
| | | | | | synthetase 9.80e−25 | | |
| 458, | NEQ231 | DNA-directed RNA | DNA-directed RNA | 9.00E−10 | RpoE2 Archaeal | 2.7.7.6 | Information |
| 459 | | polymerase, subunit | polymerase, subunit E | | DNA-directed RNA | | storage and |
| | | E″ (rpoE2) [S | (rpoE2) [Sulfolobus | | polymerase subunit | | processing; Transcription; |
| | | solfataricus] | solfataricus]. | | E″ (RpoE″ or | | DNA- |
| | | | | | RpoE2) 1.90e−17 | | directed |
| | | | | | | | RNA |
| | | | | | | | polymerase |
| | | | | | | | subunit E′ 2e−07 |
| 460, | NEQ233 | hypothetical protein | hypothetical protein | 0.22 | 0 | | |
| 461 | | | [Plasmodium yoelii | | | | |
| | | | yoelii]. | | | | |
| 462, | NEQ232 | hypothetical protein | hypothetical protein | 1.00E−04 | 0 | | |
| 463 | | | [Pyrococcus | | | | |
| | | | horikoshii]. | | | | |
| 464, | NEQ234 | methanol | methanol | 8.00E−73 | AAA ATPase family | | Poorly |
| 465 | | dehydrogenase | dehydrogenase | | associated with various | | characterized; |
| | | regulator; (moxR) | regulator; (moxR) | | cellular activities (AAA) | | General |
| | | [Pyrococcus | [Pyrococcus furiosus | | 6.90e−4 :Mg_chelatase | | function |
| | | furiosus] | DSM 3638]. | | Magnesium chelatase, | | prediction |
| | | | | | subunit ChII 4.20e−09 | | only; MoxR- |
| | | | | | | | like ATPases |
| | | | | | | | 2e−73 |
| 466, | NEQ235 | NMD protein | conserved protein | 1.00E−17 | 1.30E−18 | | Information |
| 467 | | affecting | [Methanothermobacter | | | | storage and |
| | | ribosomestability and | thermautotrophicus]. | | | | processing; Translation, |
| | | mRNA decay | | | | | ribosomal |
| | | | | | | | structure and |
| | | | | | | | biogenesis; NMD |
| | | | | | | | protein |
| | | | | | | | affecting |
| | | | | | | | ribosome |
| | | | | | | | stability and |
| | | | | | | | mRNA decay |
| | | | | | | | 1e−18 |
| 468, | NEQ236 | hypothetical protein | ELM2 domain, | 3.00E−09 | 0 | | |
| 469 | | | putative [Plasmodium | | | | |
| | | | yoelii yoelii]. | | | | |
| 470, | NEQ237 | hypothetical | conserved | 1.00E−04 | 0 | | |
| 471 | | proteinmaybe | hypothetical protein | | | | |
| | | membran protein | [Methanosarcina | | | | |
| | | | acetivorans str. C2A]. | | | | |
| 472, | NEQ238 | protoporphyrinogen | protoporphyrinogen | 2.00E−26 | hemK_rel_arch | | Information |
| 473 | | oxidase | oxidase (hemK) | | hemK_rel_arch methylase, | | storage and |
| | | (hemK)[Methanococcus | [Methanococcus | | putative 5.80e−41 | | processing; Translation, |
| | | jannaschii] | jannaschii]. | | | | ribosomal |
| | | | | | | | structure and |
| | | | | | | | biogenesis; Predicted |
| | | | | | | | rRNA |
| | | | | | | | or tRNA |
| | | | | | | | methylase 1e−27 |
| 474, | NEQ239 | leucyl-tRNA | leucyl-tRNA | 1.00E−168 | tRNA-synt_1 tRNA | 6.1.1.4 | Information |
| 475 | | synthetase (leuS) | synthetase (leuS) | | synthetases class I | | storage and |
| | | (class1a) | [Methanococcus | | (I, L, M and V) | | processing; Translation, |
| | | [Methanococcus | jannaschii]. | | 1.60e−12 :ileS ileS | | ribosomal |
| | | jannaschii] | | | isoleucyl-tRNA | | structure and |
| | | | | | synthetase 1.00e−06 | | biogenesis; Leucyl- |
| | | | | | :leuS_arch | | tRNA |
| | | | | | leuS_arch leucyl- | | synthetase |
| | | | | | tRNA synthetase | | 1e−169 |
| | | | | | 6.10e−170 | | |
| | | | | | :leuS_bact | | |
| | | | | | leuS_bact leucyl- | | |
| | | | | | tRNA synthetase | | |
| | | | | | 1.50e−3 :metG metG | | |
| | | | | | methionyl-tRNA | | |
| | | | | | synthetase 1.50e−06 | | |
| | | | | | :valS valS valyl- | | |
| | | | | | tRNA synthetase | | |
| | | | | | 4.10e−07 | | |
| 476, | NEQ240 | DNA polymerase II | DNA polymerase | 3.00E−67 | Metallophos | 2.7.7.7 | Information |
| 477 | | small subunit (PolII) | delta small subunit | | Calcineurin-like | | storage and |
| | | [Mc. jannaschii] | [Methanococcus | | phosphoesterase | | processing; DNA |
| | | | jannaschii]. | | 4.80e−13 :tRNA_anti | | replication, |
| | | | | | OB-fold nucleic acid | | recombination |
| | | | | | binding domain | | and |
| | | | | | 2.80e−10 | | repair; DNA |
| | | | | | | | polymerase II |
| | | | | | | | small subunit |
| | | | | | | | (predicted |
| | | | | | | | phosphatase) |
| | | | | | | | 2e−68 |
| 478, | NEQ241 | LSU ribosomal | 50S ribosomal protein | 2.00E−38 | Ribosomal_L6 Ribosomal | | Information |
| 479 | | protein | L6 [Pyrococcus | | protein L6 2.60e−17 | | storage and |
| | | L6[Pyrococcus | horikoshii]. | | :Ribosomal_L6 Ribosomal | | processing; Translation, |
| | | horikoshii] | | | protein L6 2.70e−06 | | ribosomal |
| | | | | | | | structure and |
| | | | | | | | biogenesis; Ribosomal |
| | | | | | | | protein L6 1e−39 |
| 480, | NEQ242 | SSU Ribosomal | Ribosomal protein S7 | 8.00E−52 | Ribosomal_S7 Ribosomal | | Information |
| 481 | | protein | [Methanopyrus | | protein S7p/S5e 9.00e−50 | | storage and |
| | | S7[Methanopyrus | kandleri AV19]. | | :S7_S5_E_A S7_S5_E_A | | processing; Translation, |
| | | kandleri AV19] | | | ribosomal protein S7 4.20e−95 | | ribosomal |
| | | | | | :rpsG_bact rpsG_bact | | structure and |
| | | | | | ribosomal protein S7 2.70e−09 | | biogenesis; Ribosomal |
| | | | | | | | protein S7 8e−51 |
| 482, | NEQ243 | hypothetical protein | hypothetical protein | 4.00E−04 | 0 | | |
| 483 | | | [Ferroplasma | | | | |
| | | | acidarmanus]. | | | | |
| 484, | NEQ245 | Glutamyl-tRNA-Gln | 628aa long conserved | 2.00E−80 | GatB_N PET112 | 6.3.5.— | Information |
| 485 | | amidotransferase | hypothetical protein | | family, N terminal | | storage and |
| | | (gatE) [Sulfolobus | [Sulfolobus tokodaii]. | | region 2.30e−90 | | processing; Translation, |
| | | solfataricus] SPLIT | | | :gatB gatB | | ribosomal |
| | | See SEQ ID | | | glutamyl-tRNA(Gln) | | structure and |
| | | NOS: 772, 773 | | | amidotransferase, B | | biogenesis; Archaeal |
| | | | | | subunit 1.90e−27 | | Glu- |
| | | | | | :gatB_rel gatB_rel | | tRNAGln |
| | | | | | aspartyl-tRNA(Asn) | | amidotransferase |
| | | | | | amidotransferase, B | | subunit E |
| | | | | | subunit, putative | | (contains |
| | | | | | 5.10e−109 | | GAD domain) |
| | | | | | | | 1e−79 |
| 486, | NEQ244 | conserved | conserved | 1.00E−29 | UPF0099 Domain of | | Poorly |
| 487 | | hypothetical | hypothetical protein | | unknown function UPF0099 | | characterized; |
| | | protein[Thermoplasma | [Thermoplasma | | 1.50e−37 :TIGR00283 | | Function |
| | | acidophilum] | acidophilum]. | | TIGR00283 conserved | | unknown; Uncharacterized |
| | | | | | hypothetical protein | | ACR 8e−31 |
| | | | | | TIGR00283 6.30e−41 | | |
| 488, | NEQ246 | hypothetical protein | hypothetical protein | 0.09 | 0 | | |
| 489 | | | [Plasmodium | | | | |
| | | | falciparum 3D7]. | | | | |
| 490, | NEQ247 | SSU ribosomal | 30S ribosomal protein | 4.00E−49 | S4 S4 domain 1.60e−18 | | Information |
| 491 | | protein | S4 [Pyrococcus | | :rpsD_bact rpsD_bact | | storage and |
| | | S4P[Pyrococcus | horikoshii]. | | ribosomal protein S4 7.20e−4 | | processing; Translation, |
| | | horikoshii] | | | :rpsD_arch rpsD_arch | | ribosomal |
| | | | | | ribosomal protein S4 3.00e−79 | | structure and |
| | | | | | | | biogenesis; Ribosomal |
| | | | | | | | protein S4 |
| | | | | | | | and related |
| | | | | | | | proteins 3e−50 |
| 492, | NEQ248 | Predicted exosome | ribonuclease ph (rph) | 1.00E−42 | RNase_PH 3′ | 2.7.7. | Information |
| 493 | | subunit, RNase | [Pyrococcus furiosus | | exoribonuclease | 56 | storage and |
| | | PH[Methanopyrus | DSM 3638]. | | family, domain 1 | | processing; Translation, |
| | | kandleri AV19] | | | 1.10e−27 | | ribosomal |
| | | | | | :RNase_PH_C 3′ | | structure and |
| | | | | | exoribonuclease | | biogenesis; RNase |
| | | | | | family, domain 2 | | PH 9e−44 |
| | | | | | 1.30e−3 | | |
| 494, | NEQ249 | hypothetical protein | | | | | |
| 495 | | | | | | | |
| 496, | NEQ250 | hypothetical protein | putative hemolysin III | 0.04 | | | |
| 497 | | | [Streptococcus | | | | |
| | | | mutans UA159]. | | | | |
| 498, | NEQ252 | valyl-tRNA | valyl-tRNA synthetase | 1.00E−166 | tRNA-synt_1 tRNA | 6.1.1.9 | Information |
| 499 | | synthetase (class | [Aeropyrum pernix]. | | synthetases class I | | storage and |
| | | 1a)[Aeropyrum | | | (I, L, M and V) | | processing; Translation, |
| | | pernix] | | | 3.20e−73 :ileS ileS | | ribosomal |
| | | | | | isoleucyl-tRNA | | structure and |
| | | | | | synthetase 5.00e−21 | | biogenesis; Valyl- |
| | | | | | :leuS_bact | | tRNA |
| | | | | | leuS_bact leucyl- | | synthetase |
| | | | | | tRNA synthetase | | 1e−167 |
| | | | | | 1.70e−07 :metG | | |
| | | | | | metG methionyl- | | |
| | | | | | tRNA synthetase | | |
| | | | | | 1.20e−09 :valS valS | | |
| | | | | | valyl-tRNA | | |
| | | | | | synthetase 1.70e−109 | | |
| 500, | NEQ254 | hypothetical protein | K10D2.3.p | 0.25 | 0 | | |
| 501 | | | [Caenorhabditis | | | | |
| | | | elegans]. | | | | |
| 502, | NEQ253 | hypothetical protein | thyrotropin-releasing | 0.02 | 0 | | |
| 503 | | | hormone receptor | | | | |
| | | | [Homo sapiens]. | | | | |
| 504, | NEQ256 | DNA double-strand | DNA double-strand | 6.00E−68 | SMC_N | 3.1.11.— | Information |
| 505 | | break repair | break repair rad50 | | RecF/RecN/SMC N | | storage and |
| | | rad50ATPase | ATPase. | | terminal domain | | processing; DNA |
| | | | | | 1.90e−07 | | replication, |
| | | | | | | | recombination |
| | | | | | | | and |
| | | | | | | | repair; ATPase |
| | | | | | | | involved in |
| | | | | | | | DNA repair |
| | | | | | | | 3e−66 |
| 506, | NEQ255 | hypothetical protein | unknown | 0.32 | 0 | | |
| 507 | | | [Fusobacterium | | | | |
| | | | nucleatum subsp. | | | | |
| | | | nucleatum ATCC | | | | |
| | | | 25586]. | | | | |
| 508, | NEQ257 | LSU ribosomal | LSU ribosomal protein | 1.00E−29 | KOW KOW motif 8.90e−08 | | Information |
| 509 | | protein | L24P [Pyrococcus | | :rplX_A_E rplX_A_E | | storage and |
| | | L24P[Pyrococcus | abyssi] | | ribosomal protein L24 2.00e−40 | | processing; Translation, |
| | | abyssi] | | | | | ribosomal |
| | | | | | | | structure and |
| | | | | | | | biogenesis; Ribosomal |
| | | | | | | | protein L24 |
| | | | | | | | 1e−30 |
| 510, | NEQ258 | hypothetical protein | conserved | 3.00E−05 | 8.50E−04 | | |
| 511 | | | hypothetical protein | | | | |
| | | | [Archaeoglobus | | | | |
| | | | fulgidus]. | | | | |
| 512, | NEQ259 | hypothetical protein | putative peptidoglycan | 2.00E−04 | 0 | | |
| 513 | | | bound protein | | | | |
| | | | (LPXTG motif) | | | | |
| | | | [Listeria innocua]. | | | | |
| 514, | NEQ261 | tRNA intron | hypothetical protein | 1.00E−05 | 0 | | |
| 515 | | endonuclease | [Methanosarcina | | | | |
| | | (endA) | barkeri]. | | | | |
| | | [M. acetovorans] | | | | | |
| 516, | NEQ260 | hypothetical protein | hypothetical protein 4- | 0.04 | 0 | | |
| 517 | | | Trypanosoma brucei | | | | |
| | | | mitochondrion. | | | | |
| 518, | NEQ262 | LSU Ribosomal | hypothetical protein | 8.00E−06 | Ribosomal_L29 Ribosomal | | |
| 519 | | protein L29 | [Clostridium | | L29 protein 1.80e−06 :L29 | | |
| | | | thermocellum ATCC | | L29 ribosomal protein L29 4.40e−15 | | |
| | | | 27405]. | | | | |
| 520, | NEQ264 | Translation initiation | Translation initiation | 4.00E−12 | SUI1 Translation initiation | | Information |
| 521 | | factor | factor [Pyrococcus | | factor SUI1 9.70e−10 | | storage and |
| | | (SUI1)[Pyrococcus | horikoshii]. | | :SUI1_rel SUI1_rel | | processing; Translation, |
| | | horikoshii] | | | translation initation factor | | ribosomal |
| | | | | | SUI1, putative 1.10e−10 | | structure and |
| | | | | | | | biogenesis; Translation |
| | | | | | | | initiation |
| | | | | | | | factor (SUI1) |
| | | | | | | | 2e−13 |
| 522, | NEQ263 | V-type H+- | H+-transporting ATP | 1.00E−100 | ATP-synt_ab ATP | 3.6.3. | Metabolism; Energy |
| 523 | | transporting ATP | synthase, subunit B | | synthase alpha/beta | 14 | production |
| | | synthasebeta chain | (atpB) | | family, nucleotide- | | and |
| | | (V-type ATPase | [Methanococcus | | binding domain | | conversion; Archaeal/ |
| | | subunit B) | jannaschii]. | | 2.10e−68 :ATP- | | vacuolar- |
| | | | | | synt_ab_C ATP | | type H+- |
| | | | | | synthase alpha/beta | | ATPase |
| | | | | | chain, C terminal | | subunit B 1e−101 |
| | | | | | domain 3.40e−08 | | |
| | | | | | :atpA atpA ATP | | |
| | | | | | synthase F1, alpha | | |
| | | | | | subunit 1.20e−3 | | |
| | | | | | :flil_yscN flil_yscN | | |
| | | | | | ATPase Flil/YscN | | |
| | | | | | family 2.00e−11 | | |
| | | | | | :atpD atpD ATP | | |
| | | | | | synthase F1, beta | | |
| | | | | | subunit 2.70e−11 :V- | | |
| | | | | | ATPase_V1_B V- | | |
| | | | | | ATPase_V1_B V- | | |
| | | | | | type ATPase, | | |
| | | | | | subunit B 2.70e−111 | | |
| | | | | | :ATP_syn_B_arch | | |
| | | | | | ATP_syn_B_arch | | |
| | | | | | ATP synthase | | |
| | | | | | archaeal, B subunit | | |
| | | | | | 4.70e−132 | | |
| | | | | | :ATP_syn_A_arch | | |
| | | | | | ATP_syn_A_arch | | |
| | | | | | ATP synthase | | |
| | | | | | archaeal, A subunit | | |
| | | | | | 6.30e−3 | | |
| 524, | NEQ265 | Hypothetical protein | predicted cytoskeletal | 1.00E−06 | 0 | | |
| 525 | | | protein [Mycoplasma | | | | |
| | | | penetrans] | | | | |
| 526, | NEQ266 | hypothetical protein | hypothetical protein | 0.01 | 0 | | |
| 527 | | | [Plasmodium | | | | |
| | | | falciparum 3D7]. | | | | |
| 528, | NEQ267 | SPLIT see SEQ ID | conserved | 8.00E−20 | | | Poorly |
| 529 | | NOS: 530, 531; | hypothetical protein | | | | characterized; |
| | | flagella | [Methanococcus | | | | Function |
| | | accessoryprotein | jannaschii]. | | | | unknown; Predicted |
| | | [Methanococcus | | | | | membrane |
| | | voltae] | | | | | protein 5e−21 |
| 530, | NEQ268 | SPLIT see SEQ ID | conserved | 2.00E−26 | DUF110 Integral membrane | | Poorly |
| 531 | | NOS: 528, 529; | hypothetical protein | | protein DUF110 8.30e−3 | | characterized; |
| | | FLAGELLAACCESSORY | [Archaeoglobus | | | | Function |
| | | PROTEIN J | fulgidus]. | | | | unknown; Predicted |
| | | | | | | | membrane |
| | | | | | | | protein 1e−27 |
| 532, | NEQ270 | translation initiation | Chain A, Structure Of | 1.00E−104 | GTP_EFTU | 3.6.1. | Information |
| 533 | | factor aIF-2, subunit | The Wild-Type Large | | Elongation factor Tu | 48 | storage and |
| | | gamma [Pyrococcus | Gamma Subunit Of | | GTP binding domain | | processing; Translation, |
| | | abyssi] | Initiation Factor Eif2 | | 1.60e−44 | | ribosomal |
| | | | From Pyrococcus | | :GTP_EFTU_D2 | | structure and |
| | | | Abyssi Complexed | | Elongation factor Tu | | biogenesis; GTPases- |
| | | | With Gdp-Mg2+. | | domain 2 2.00e−06 | | translation |
| | | | | | :small_GTP | | elongation |
| | | | | | small_GTP small | | factors 1e−106 |
| | | | | | GTP-binding protein | | |
| | | | | | domain 4.00e−06 | | |
| | | | | | :selB selB | | |
| | | | | | selenocysteine- | | |
| | | | | | specific translation | | |
| | | | | | elongation factor | | |
| | | | | | 8.20e−07 :EF- | | |
| | | | | | 1_alpha EF-1_alpha | | |
| | | | | | translation | | |
| | | | | | elongation factor | | |
| | | | | | EF-1, subunit alpha | | |
| | | | | | 3.70e−06 :EF-Tu EF- | | |
| | | | | | Tu translation | | |
| | | | | | elongation factor Tu | | |
| | | | | | 3.80e−09 :FOLD979 | | |
| | | | | | No CATH | | |
| | | | | | Annotation 1.60e−127 | | |
| 534, | NEQ271 | hypothetical protein | purine NTPase | 5.00E−06 | 0 | | Information |
| 535 | | | [Methanococcus | | | | storage and |
| | | | jannaschii]. | | | | processing; DNA |
| | | | | | | | replication, |
| | | | | | | | recombination |
| | | | | | | | and |
| | | | | | | | repair; ATPase |
| | | | | | | | involved in |
| | | | | | | | DNA repair |
| | | | | | | | 3e−07 |
| 536, | NEQ273 | hypothetical protein | NADH | 0.04 | 0 | | |
| 537 | | | dehydrogenase I, J | | | | |
| | | | subunit [Brucella suis | | | | |
| | | | 1330]. | | | | |
| 538, | NEQ275 | hypothetical protein | hypothetical protein | 3.00E−06 | 0 | | |
| 539 | | | [Plasmodium yoelii | | | | |
| | | | yoelii]. | | | | |
| 540, | NEQ274 | SSU ribosomal | SSU ribosomal | 2.00E−27 | Ribosomal_S8 Ribosomal | | Information |
| 541 | | protein S8P; | protein S8P; (rps8E) | | protein S8 7.00e−32 | | storage and |
| | | (rps8E)[Pyrococcus | [Pyrococcus furiosus | | | | processing; Translation, |
| | | furiosus DSM 3638] | DSM 3638]. | | | | ribosomal |
| | | | | | | | structure and |
| | | | | | | | biogenesis; Ribosomal |
| | | | | | | | protein S8 5e−28 |
| 542, | NEQ276 | transcription initiation | transcription initiation | 2.00E−69 | transcript_fac2 Transcription | | Information |
| 543 | | factor IIB(TFIIB) | factor IIB [Pyrococcus | | factor TFIIB repeat 1.60e−17 | | storage and |
| | | (TFB)[Pyrococcus | abyssi] | | :transcript_fac2 | | processing; Transcription; |
| | | abyssi] | | | Transcription factor TFIIB | | Transcription |
| | | | | | repeat 8.40e−14 | | initiation |
| | | | | | | | factor IIB 1e−70 |
| 544, | NEQ277 | hypothetical protein | hypothetical protein | 1.00E−03 | 0 | | |
| 545 | | [Archaeoglobus fulgidus] | [Archaeoglobus | | | | |
| | | | fulgidus]. | | | | |
| 546, | NEQ278 | hypothetical protein | putative outer | 0.35 | 0 | | |
| 547 | | | membrane protein; | | | | |
| | | | probably involved in | | | | |
| | | | nutrient binding | | | | |
| | | | [Bacteroides | | | | |
| | | | thetaiotaomicron VPI- | | | | |
| | | | 5482] | | | | |
| 548, | NEQ279 | hypothetical protein | hypothetical protein | 4.00E−04 | 0 | | |
| 549 | | | [Plasmodium | | | | |
| | | | falciparum 3D7]. | | | | |
| 550, | NEQ281 | hypothetical protein | hypothetical protein | 1.00E−10 | | | Poorly |
| 551 | | | [Pyrococcus | | | | characterized; |
| | | | horikoshii]. | | | | General |
| | | | | | | | function |
| | | | | | | | prediction |
| | | | | | | | only; Archaeal |
| | | | | | | | serine |
| | | | | | | | proteases 8e−12 |
| 552, | NEQ280 | hypothetical protein | hypothetical protein | 0.14 | 0 | | |
| 553 | | | [Plasmodium | | | | |
| | | | falciparum 3D7]. | | | | |
| 554, | NEQ282 | minichromosome | DNA replication | 1.00E−121 | MCM MCM2/3/5 family | | Information |
| 555 | | maintenance(MCM) | initiator | | 1.50e−172 :TIGR00368 | | storage and |
| | | protein [Sulfolobus | (Cdc21/Cdc54) | | TIGR00368 Mg chelatase- | | processing; DNA |
| | | | [Methanothermobacter | | related protein 9.00e−3 | | replication, |
| | | | thermautotrophicus]. | | | | recombination |
| | | | | | | | and |
| | | | | | | | repair; Predicted |
| | | | | | | | ATPase |
| | | | | | | | involved in |
| | | | | | | | replication |
| | | | | | | | control, |
| | | | | | | | Cdc46/Mcm |
| | | | | | | | family 1e−122 |
| 556, | NEQ283 | Predicted ATPase of | conserved | 6.00E−48 | PAPS_reduct | | Cellular |
| 557 | | the PP- | hypothetical protein | | Phosphoadenosine | | processes; Cell |
| | | loopsuperfamily | [Archaeoglobus | | phosphosulfate reductase | | division and |
| | | implicated in cell | fulgidus]. | | family 8.60e−4 :UPF0021 | | chromosome |
| | | cycle | | | Uncharacterized protein | | partitioning; Predicted |
| | | | | | family UPF0021 4.50e−15 | | ATPase of |
| | | | | | :TIGR00269 TIGR00269 | | the PP-loop |
| | | | | | conserved hypothetical | | superfamily |
| | | | | | protein TIGR00269 3.70e−4 | | implicated in |
| | | | | | | | cell cycle |
| | | | | | | | control 4e−49 |
| 558, | NEQ284 | hypothetical protein | methylase ermT | 0.02 | 0 | | |
| 559 | | | [Plasmid p121BS]. | | | | |
| 560, | NEQ285 | conserved | hypothetical protein | 1.00E−25 | 0 | | |
| 561 | | hypothetical | [Methanosarcina | | | | |
| | | protein[Sulfolobus | barkeri]. | | | | |
| | | tokodaii] | | | | | |
| 562, | NEQ288 | putative archeal | archaeal histone | 1.00E−09 | CBFD_NFYB_HMF Histone- | | Information |
| 563 | | histone | [Methanococcus | | like transcription factor | | storage and |
| | | | jannaschii]. | | (CBF/NF-Y) and archaeal | | processing; DNA |
| | | | | | histone 1.40e−12 | | replication, |
| | | | | | | | recombination |
| | | | | | | | and |
| | | | | | | | repair; Histones |
| | | | | | | | H3 and H4 |
| | | | | | | | 6e−11 |
| 564, | NEQ290 | hypothetical protein | putative transport | 0.11 | 0 | | |
| 565 | | | protein [Buchnera | | | | |
| | | | aphidicola (Baizongia | | | | |
| | | | pistaciae)] | | | | |
| 566, | NEQ289 | hypothetical protein | agCP6807 | 0.06 | 0 | | |
| 567 | | | [Anopheles gambiae | | | | |
| | | | str. PEST]. | | | | |
| 568, | NEQ291 | hypothetical protein | Uncharacterized | 3.00E−03 | 0 | | |
| 569 | | | protein conserved in | | | | |
| | | | bacteria | | | | |
| | | | [Wigglesworthia | | | | |
| | | | brevipalpis]. | | | | |
| 570, | NEQ292 | hypothetical protein | HEP27 PROTEIN | 6.9 | 0 | | |
| 571 | | | (PROTEIN D). | | | | |
| 572, | NEQ293 | conserved | hypothetical protein | 2.00E−40 | UPF0024 Uncharacterized | | Poorly |
| 573 | | hypothetical | [Aquifex aeolicus]. | | protein family UPF0024 | | characterized; |
| | | protein[Aquifex | | | 2.20e−46 :TIGR00094 | | Function |
| | | aeolicus] | | | TIGR00094 conserved | | unknown; Uncharacterized |
| | | Electrontransfer | | | hypothetical protein | | ACR 1e−41 |
| | | | | | TIGR00094 3.30e−19 | | |
| | | | | | :TIGR00094 TIGR00094 | | |
| | | | | | conserved hypothetical | | |
| | | | | | protein TIGR00094 5.40e−16 | | |
| 574, | NEQ294 | n-type ATP | hypothetical protein | 1.00E−35 | DUF71 Domain of unknown | | Poorly |
| 575 | | pyrophosphatasesuperfamily | [Pyrococcus | | function DUF71 5.10e−34 | | characterized; |
| | | [Pyrococcus | horikoshii]. | | :TIGR00289 TIGR00289 | | General |
| | | furiosus] | | | conserved hypothetical | | function |
| | | | | | protein TIGR00289 2.50e−21 | | prediction |
| | | | | | :MJ0570_dom MJ0570_dom | | only; Predicted |
| | | | | | MJ0570-related | | ATPases of |
| | | | | | uncharacterized domain | | PP-loop |
| | | | | | 3.80e−31 | | superfamily |
| | | | | | | | 1e−36 |
| 576, | NEQ295 | putative nucleolar | NUCLEOLAR | 2.00E−45 | Nol1_Nop2_Sun | 2.1.1.— | Information |
| 577 | | protein III (nol1- | PROTEIN | | NOL1/NOP2/sun | | storage and |
| | | nop2-sun family) | [Pyrococcus abyssi]. | | family 1.90e−38 | | processing; Translation, |
| | | | | | :nop2p nop2p | | ribosomal |
| | | | | | NOL1/NOP2/sun | | structure and |
| | | | | | family putative RNA | | biogenesis; tRNA |
| | | | | | methylase 5.90e−53 | | and rRNA |
| | | | | | :rsmB rsmB Sun | | cytosine-C5- |
| | | | | | protein 5.50e−06 | | methylases |
| | | | | | | | 1e−46 |
| 578, | NEQ297 | LSU Ribosomal | LSU ribosomal protein | 6.00E−17 | Ribosomal_L34e Ribosomal | | Information |
| 579 | | protein L34E | L34E [Methanococcus | | protein L34e 8.70e−15 | | storage and |
| | | | jannaschii]. | | | | processing; Translation, |
| | | | | | | | ribosomal |
| | | | | | | | structure and |
| | | | | | | | biogenesis; Ribosomal |
| | | | | | | | protein L34E |
| | | | | | | | 3e−18 |
| 580, | NEQ296 | hypothetical protein | MURF2 protein (AA 1- | 2.00E−04 | 0 | | |
| 581 | | | 348) [Crithidia | | | | |
| | | | fasciculata]. | | | | |
| 582, | NEQ298 | Acetyltransferase | hypothetical protein | 1.00E−10 | 0 | | |
| 583 | | [Fusobacteriumnucleatum | [Pyrococcus | | | | |
| | | subsp. | horikoshii]. | | | | |
| | | nucleatum] | | | | | |
| 584, | NEQ299 | Predicted ABC-class | transport protein | 1.00E−155 | ABC_tran ABC | 1.8.—.— | Poorly |
| 585 | | ATPase, RNaseL | [Pyrococcus | | transporter 1.80e−23 | | characterized; |
| | | inhibitor homolog [M. kandleri] | horikoshii]. | | :ABC_tran ABC | | General |
| | | | | | transporter 2.90e−18 | | function |
| | | | | | :fer4 4Fe-4S binding | | prediction |
| | | | | | domain 4.40e−09 | | only; RNase L |
| | | | | | :3a0501s02 | | inhibitor |
| | | | | | 3a0501s02 Type II | | homolog, |
| | | | | | (General) Secretory | | predicted |
| | | | | | Pathway (IISP) | | ATPase 1e−156 |
| | | | | | Family protein | | |
| | | | | | 5.30e−3 :3a0106s01 | | |
| | | | | | 3a0106s01 sulfate | | |
| | | | | | transport system | | |
| | | | | | permease protein | | |
| | | | | | 4.90e−05 :cbiO cbiO | | |
| | | | | | cobalt transport | | |
| | | | | | protein ATP-binding | | |
| | | | | | subunit 1.00e−05 | | |
| | | | | | :ntrCD ntrCD nitrate | | |
| | | | | | transport ATP- | | |
| | | | | | binding subunits C | | |
| | | | | | and D 7.90e−4 :drrA | | |
| | | | | | drrA daunorubicin | | |
| | | | | | resistance ABC | | |
| | | | | | transporter ATP- | | |
| | | | | | binding subunit | | |
| | | | | | 5.00e−05 :thiQ thiQ | | |
| | | | | | ABC transporter, | | |
| | | | | | ATP-binding protein, | | |
| | | | | | ThiQ subfamily | | |
| | | | | | 7.20e−3 :RLI | | |
| | | | | | Possible metal- | | |
| | | | | | binding domain in | | |
| | | | | | RNase L inhibitor, | | |
| | | | | | RLI 3.70e−14 | | |
| 586, | NEQ300 | hypothetical surface | surface layer protein | 3.00E−06 | 0 | | |
| 587 | | layer protein | [Methanothermococcus | | | | |
| | | [Mcthermolithotrophicus] | thermolithotrophicus]. | | | | |
| 588, | NEQ301 | hypothetical protein | EsV-1-147 | 0.04 | 0 | | |
| 589 | | | [Ectocarpus | | | | |
| | | | siliculosus virus]. | | | | |
| 590, | NEQ302 | glutamyl-tRNA | glutamyl-tRNA | 1.00E−122 | tRNA-synt_1c tRNA | 6.1.1. | Information |
| 591 | | synthetase (class | synthetase | | synthetases class I | 17 | storage and |
| | | 1)[Pyrococcus | [Pyrococcus abyssi]. | | (E and Q), catalytic | | processing; Translation, |
| | | abyssi] | | | domain 2.50e−80 | | ribosomal |
| | | | | | :glnS glnS | | structure and |
| | | | | | glutaminyl-tRNA | | biogenesis; Glutamyl- |
| | | | | | synthetase 3.00e−36 | | and |
| | | | | | :gltX_arch gltX_arch | | glutaminyl- |
| | | | | | glutamyl-tRNA | | tRNA |
| | | | | | synthetase 5.20e−147 | | synthetases |
| | | | | | :gltX_bact | | 1e−123 |
| | | | | | gltX_bact glutamyl- | | |
| | | | | | tRNA synthetase | | |
| | | | | | 1.40e−13 :tRNA- | | |
| | | | | | synt_1c_C tRNA | | |
| | | | | | synthetases class I | | |
| | | | | | (E and Q), anti- | | |
| | | | | | codon binding | | |
| | | | | | domain 2.00e−07 | | |
| 592, | NEQ303 | LSU Ribosomal | LSU ribosomal protein | 1.00E−19 | Ribosomal_L35Ae | | Information |
| 593 | | protein L35AE | L35AE. [Pyrococcus | | Ribosomal protein L35Ae | | storage and |
| | | | abyssi] | | 1.00e−20 | | processing; Translation, |
| | | | | | | | ribosomal |
| | | | | | | | structure and |
| | | | | | | | biogenesis; Ribosomal |
| | | | | | | | protein |
| | | | | | | | L35AE/L33A |
| | | | | | | | 7e−21 |
| 594, | NEQ304 | hypothetical | M. jannaschii | 0.01 | 0 | | |
| 595 | | | predicted coding | | | | |
| | | | region MJ0944 | | | | |
| | | | [Methanococcus | | | | |
| | | | jannaschii]. | | | | |
| 596, | NEQ305 | Archaeosine tRNA- | archaeosine tRNA- | 2.00E−08 | 0 | | Cellular |
| 597 | | ribosyltransferase[T | ribosyltransferase | | | | processes; Posttranslational |
| | | volcanium] SPLIT | [Methanosarcina | | | | modification, |
| | | See SEQ ID | mazei Goe1]. | | | | protein |
| | | NOS: 248, 249 | | | | | turnover, |
| | | | | | | | chaperones; Prefoldin, |
| | | | | | | | molecular |
| | | | | | | | chaperone |
| | | | | | | | implicated in |
| | | | | | | | de novo |
| | | | | | | | protein |
| | | | | | | | folding, alpha |
| | | | | | | | subunit 7e−08 |
| 598, | NEQ306 | 3-oxoacyl-[acyl- | 3-oxoacyl-[acyl- | 1.00E−30 | adh_short short | 1.1.1. | Metabolism; Secondary |
| 599 | | carrier- | carrier-protein] | | chain | 100 | metabolites |
| | | protein]reductase | reductase [Aquifex | | dehydrogenase | | biosynthesis, |
| | | [Aquifex aeolicus] | aeolicus]. | | 5.90e−45 | | transport and |
| | | | | | | | catabolism; Dehydrogenases |
| | | | | | | | with |
| | | | | | | | different |
| | | | | | | | specificities |
| | | | | | | | (related to |
| | | | | | | | short-chain |
| | | | | | | | alcohol |
| | | | | | | | dehydrogenases) |
| | | | | | | | 1e−31 |
| 600, | NEQ307 | nucleoside | Nucleoside | 8.00E−41 | NDK Nucleoside | 2.7.4.6 | Metabolism; Nucleotide |
| 601 | | diphosphate kinase | diphosphate kinase | | diphosphate kinase | | transport and |
| | | (ndk)[Pyrobaculum | (NDK) (NDP kinase) | | 1.10e−22 | | metabolism; Nucleoside |
| | | aerophilum] | (Nucleoside-2-P | | | | diphosphate |
| | | | kinase). | | | | kinase 1e−26 |
| 602, | NEQ309 | hypothetical protein | hypothetical protein | 0.45 | 0 | | |
| 603 | | | [Pyrococcus furiosus | | | | |
| | | | DSM 3638]. | | | | |
| 604, | NEQ308 | Seryl-tRNA | 453aa long | 1.00E−77 | Seryl_tRNA_N | 6.1.1. | Information |
| 605 | | synthetase (class | hypothetical seryl- | | Seryl-tRNA | 11 | storage and |
| | | 2)[Sulfolobus | tRNA synthetase | | synthetase N- | | processing; Translation, |
| | | tokodaii] | [Sulfolobus tokodaii]. | | terminal domain | | ribosomal |
| | | | | | 2.90e−10 :tRNA- | | structure and |
| | | | | | synt_2b tRNA | | biogenesis; Seryl- |
| | | | | | synthetase class II | | tRNA |
| | | | | | core domain (G, H, | | synthetase |
| | | | | | P, S and T) 5.60e−42 | | 1e−76 |
| | | | | | :serS serS seryl- | | |
| | | | | | tRNA synthetase | | |
| | | | | | 1.90e−81 | | |
| 606, | NEQ310 | hypothetical protein | hypothetical protein | 2.00E−14 | 0 | | Poorly |
| 607 | | [Pyrococcusabyssi] | [Pyrococcus abyssi]. | | | | characterized; |
| | | | | | | | Function |
| | | | | | | | unknown; Uncharacterized |
| | | | | | | | ACR 3e−15 |
| 608, | NEQ312 | hypothetical protein | hypothetical protein | 0.9 | 0 | | |
| 609 | | | [Plasmodium | | | | |
| | | | falciparum 3D7]. | | | | |
| 610, | NEQ311 | LSU ribosomal | LSU ribosomal protein | 1.00E−44 | Ribosomal_L30 Ribosomal | | Information |
| 611 | | protein L30P | L30P (rpmD) | | protein L30p/L7e 7.90e−09 | | storage and |
| | | (rpmD)[Methanococcus | [Methanococcus | | :L30P_arch L30P_arch | | processing; Translation, |
| | | jannaschii] | jannaschii]. | | ribosomal protein L30P | | ribosomal |
| | | | | | 7.90e−81 :L7 L7 60S | | structure and |
| | | | | | ribosomal protein L7 3.00e−3 | | biogenesis; Ribosomal |
| | | | | | | | protein |
| | | | | | | | L30/L7E 1e−45 |
| 612, | NEQ314 | hypothetical protein | conserved | 2.00E−06 | 5.30E−04 | | Poorly |
| 613 | | | hypothetical protein | | | | characterized; |
| | | | [Archaeoglobus | | | | Function |
| | | | fulgidus]. | | | | unknown; Uncharacterized |
| | | | | | | | ACR 1e−07 |
| 614, | NEQ313 | conserved | conserved protein | 6.00E−06 | 0 | | |
| 615 | | hypothetical | [Methanosarcina | | | | |
| | | protein[Methanosarcina | mazei Goe1]. | | | | |
| | | acetivorans str. | | | | | |
| | | C2A] | | | | | |
| 616, | NEQ316 | putative dUTPase | putative | 2.00E−38 | dUTPase dUTPase | 3.5.4. | Metabolism; Nucleotide |
| 617 | | | deoxynucleotide | | 1.40e−10 :dut dut | 13 | transport and |
| | | | triphosphate | | deoxyuridine 5′- | | metabolism; Deoxycytidine |
| | | | deaminase | | triphosphate | | deaminase |
| | | | [Streptomyces | | nucleotidohydrolase | | 8e−37 |
| | | | coelicolor A3(2)]. | | (dut) 1.30e−3 | | |
| 618, | NEQ315 | proteinase IV - | hypothetical protein | 3.00E−23 | Peptidase_U7 | 3.4.21.— | Cellular |
| 619 | | [Methanococcusjannaschii] | [Prochlorococcus | | Peptidase family U7 | | processes; Cell |
| | | Periplasmic | marinus subsp. | | 7.80e−25 | | motility and |
| | | serine | pastoris str. | | :SppA_dom | | secretion; Periplasmic |
| | | | CCMP1378]. | | SppA_dom signal | | serine |
| | | | | | peptide peptidase | | proteases |
| | | | | | SppA, 36K type | | (ClpP class) |
| | | | | | 2.50e−27 | | 3e−23 |
| 620, | NEQ317 | LSU ribosomal | 50S RIBOSOMAL | 7.00E−15 | | | Information |
| 621 | | protein | PROTEIN L15P. | | | | storage and |
| | | L15[Sulfolobus | | | | | processing; Translation, |
| | | acidocaldarius] | | | | | ribosomal |
| | | | | | | | structure and |
| | | | | | | | biogenesis; Ribosomal |
| | | | | | | | protein L15 |
| | | | | | | | 7e−15 |
| 622, | NEQ318 | reverse gyrase | reverse gyrase | 1.00E−175 | Topoisom_bac DNA | 5.99. | Information |
| 623 | | [Pyrococcus abyssi] | [Pyrococcus abyssi]. | | topoisomerase | 1.3 | storage and |
| | | SPLIT See SEQ ID | | | 5.60e−59 :Toprim | | processing; DNA |
| | | NOS: 848, 849 | | | Toprim domain | | replication, |
| | | | | | 1.00e−46 :topA_bact | | recombination |
| | | | | | topA_bact DNA | | and |
| | | | | | topoisomerase I | | repair; Reverse |
| | | | | | 4.30e−32 :rgy rgy | | gyrase 1e−176 |
| | | | | | reverse gyrase | | |
| | | | | | 2.20e−36 :topB topB | | |
| | | | | | DNA topoisomerase | | |
| | | | | | III 2.50e−06 | | |
| | | | | | :topA_arch | | |
| | | | | | topA_arch DNA | | |
| | | | | | topoisomerase I | | |
| | | | | | 6.20e−10 | | |
| 624, | NEQ319 | SSU hypothetical | 126aa long | 2.00E−46 | Ribosomal_L7Ae Ribosomal | | Information |
| 625 | | 30S ribosomalprotein | hypothetical 30S | | protein | | storage and |
| | | HS6 [Sulfolobus | ribosomal protein HS6 | | L7Ae/L30e/S12e/Gadd45 | | processing; Translation, |
| | | tokodaii] | [Sulfolobus tokodaii]. | | family 1.40e−45 | | ribosomal |
| | | | | | | | structure and |
| | | | | | | | biogenesis; Ribosomal |
| | | | | | | | protein HS6- |
| | | | | | | | type |
| | | | | | | | (S12/L30/L7a) |
| | | | | | | | 4e−46 |
| 626, | NEQ321 | C4-type Zn-finger- | hypothetical protein | 1.00E−17 | ZPR1 ZPR1 zinc-finger | | Poorly |
| 627 | | containing | [Pyrococcus furiosus | | domain 1.30e−11 :ZPR1_znf | | characterized; |
| | | protein[Methanopyrus | DSM 3638]. | | ZPR1_znf ZPR1 zinc finger | | General |
| | | kandleri AV19] | | | domain 5.50e−06 :zpr1_rel | | function |
| | | | | | zpr1_rel ZPR1-related zinc | | prediction |
| | | | | | finger protein 2.00e−06 | | only; C4-type |
| | | | | | | | Zn finger 3e−18 |
| 628, | NEQ320 | SSU Ribosomla | S ribosomal protein | 2.00E−13 | 0 | | Information |
| 629 | | protein S17E | S17E [Pyrococcus | | | | storage and |
| | | | horikoshii]. | | | | processing; Translation, |
| | | | | | | | ribosomal |
| | | | | | | | structure and |
| | | | | | | | biogenesis; Ribosomal |
| | | | | | | | protein S17E |
| | | | | | | | 1e−14 |
| 630, | NEQ322 | hypothetical protein | Putative Nonclathrin | 4.9 | 0 | | |
| 631 | | | coat protein gamma- | | | | |
| | | | like protein [Oryza | | | | |
| | | | sativa (japonica | | | | |
| | | | cultivar-group)]. | | | | |
| 632, | NEQ324 | DNA topoisomerase I | DNA topoisomerase I | 9.00E−34 | | 5.99. | Information |
| 633 | | [Pyrococcus horikoshii] | [Pyrococcus | | | 1.2 | storage and |
| | | SPLIT see SEQ ID | horikoshii]. | | | | processing; DNA |
| | | NOS: 90, 91 | | | | | replication, |
| | | | | | | | recombination |
| | | | | | | | and |
| | | | | | | | repair; Topoisomerase |
| | | | | | | | IA |
| | | | | | | | 8e−35 |
| 634, | NEQ323 | translation initiation | translation initiation | 1.00E−25 | eIF5_eIF2B Domain found in | | Information |
| 635 | | factor eIF-2 | factor eIF-2 beta | | IF2B/IF5 3.30e−27 :aIF- | | storage and |
| | | beta[Pyrococcus | [Pyrococcus | | 2beta aIF-2beta translation | | processing; Translation, |
| | | horikoshii] | horikoshii]. | | initiation factor aIF-2, beta | | ribosomal |
| | | | | | subunit, putative 7.90e−26 | | structure and |
| | | | | | | | biogenesis; Translation |
| | | | | | | | initiation |
| | | | | | | | factor eIF-2, |
| | | | | | | | beta |
| | | | | | | | subunit/eIF-5 |
| | | | | | | | N-terminal |
| | | | | | | | domain 1e−26 |
| 636, | NEQ325 | conserved | hypothetical protein | 2.00E−19 | DUF207 Uncharacterized | | Poorly |
| 637 | | hypothetical | [Pyrococcus furiosus | | ACR, COG1590 1.50e−27 | | characterized; |
| | | protein[Pyrococcus | DSM 3638]. | | | | Function |
| | | furiosus DSM 3638] | | | | | unknown; Uncharacterized |
| | | | | | | | ACR 3e−20 |
| 638, | NEQ326 | SSU ribosomal | 30S ribosomal protein | 8.00E−26 | Ribosomal_S17 Ribosomal | | Information |
| 639 | | protein | S17 [Pyrococcus | | protein S17 3.70e−23 | | storage and |
| | | S17[Pyrococcus | horikoshii]. | | | | processing; Translation, |
| | | horikoshii] | | | | | ribosomal |
| | | | | | | | structure and |
| | | | | | | | biogenesis; Ribosomal |
| | | | | | | | protein S17 |
| | | | | | | | 4e−27 |
| 640, | NEQ328 | transcriptional | transcriptional | 6.00E−12 | ASNC_trans_reg AsnC | | Information |
| 641 | | regulatory | regulatory protein, | | family 7.40e−3 | | storage and |
| | | protein, asnC family | asnC family | | | | processing; Transcription; |
| | | [Pyrococcus | [Pyrococcus furiosus | | | | Transcriptional |
| | | furiosus] | DSM 3638]. | | | | regulators 4e−13 |
| 642, | NEQ327 | hypothetical protein | cell division protein | 0.05 | 0 | | |
| 643 | | | [Chaetosphaeridium | | | | |
| | | | globosum]. | | | | |
| 644, | NEQ329 | dCTP deaminase | Deoxycytidine | 2.00E−10 | 0 | 3.5.4. | Metabolism; Nucleotide |
| 645 | | [Methanosarcinaacetivorans | triphosphate | | | 13 | transport and |
| | | str. C2A] | deaminase | | | | metabolism; Deoxycytidine |
| | | | [Methanosarcinamazei | | | | deaminase |
| | | | Goe1]. | | | | 2e−07 |
| 646, | NEQ330 | hypothetical protein | | | 0 | | |
| 647 | | | | | | | |
| 648, | NEQ331 | hypothetical protein | Similar to protein | 1.00E−03 | 0 | | |
| 649 | | | kinase C substrate | | | | |
| | | | 80K-H [Mus | | | | |
| | | | musculus]. | | | | |
| 650, | NEQ332 | hypothetical protein | | | 0 | | |
| 651 | | | | | | | |
| 652, | NEQ334 | Predicted RNA- | DNA-binding protein | 2.00E−42 | 1.00E−67 | | Information |
| 653 | | binding | [Pyrococcus furiosus | | | | storage and |
| | | protein[Methanopyrus | DSM 3638]. | | | | processing; Translation, |
| | | kandleri AV19] | | | | | ribosomal |
| | | | | | | | structure and |
| | | | | | | | biogenesis; Predicted |
| | | | | | | | RNA- |
| | | | | | | | binding |
| | | | | | | | protein 8e−42 |
| 654, | NEQ333 | pseudouridylate | tRNA pseudouridine | 4.00E−10 | PseudoU_synth_1 | 4.2.1. | Information |
| 655 | | synthase I | synthase A [Bacillus | | tRNA pseudouridine | 70 | storage and |
| | | (truA)[Methanococcus | cereus ATCC 14579] | | synthase 7.20e−07 | | processing; Translation, |
| | | jannaschii] | | | :hisT_truA hisT_truA | | ribosomal |
| | | | | | tRNA pseudouridine | | structure and |
| | | | | | synthase A 7.60e−22 | | biogenesis; Pseudouridylate |
| | | | | | | | synthase |
| | | | | | | | (tRNA psi55) |
| | | | | | | | 6e−11 |
| 656, | NEQ335 | hypothetical protein | hypothetical protein | 0.01 | 0 | | |
| 657 | | | [Arabidopsis thaliana]. | | | | |
| 658, | NEQ336 | hypothetical protein | Superfamily II | 0.02 | 0 | | |
| 659 | | | DNA/RNA helicase, | | | | |
| | | | SNF2 family | | | | |
| | | | [Clostridium | | | | |
| | | | acetobutylicum]. | | | | |
| 660, | NEQ338 | DNA-directed RNA | DNA-directed RNA | 6.00E−17 | RNA_pol_N RNA | 2.7.7.6 | Information |
| 661 | | polymerase, subunit | polymerase, subunit N | | polymerases N/8 kDa | | storage and |
| | | N [Aeropyrum pernix] | [Aeropyrum pernix]. | | subunit 3.60e−25 | | processing; Transcription; |
| | | | | | | | DNA- |
| | | | | | | | directed |
| | | | | | | | RNA |
| | | | | | | | polymerase, |
| | | | | | | | subunit N |
| | | | | | | | (RpoN/RPB10) |
| | | | | | | | 3e−18 |
| 662, | NEQ337 | L-isoaspartyl protein | L-isoaspartyl protein | 8.00E−12 | 0 | 2.1.1. | Information |
| 663 | | carboxylmethyltransferase | carboxyl | | | .77 | storage and |
| | | isolog (pimT) | methyltransferase | | | | processing; Translation, |
| | | | isolog (pimT) | | | | ribosomal |
| | | | [Methanococcus | | | | structure and |
| | | | jannaschii]. | | | | biogenesis; Predicted |
| | | | | | | | SAM- |
| | | | | | | | dependent |
| | | | | | | | methyltransferase |
| | | | | | | | involved |
| | | | | | | | in tRNA-Met |
| | | | | | | | maturation |
| | | | | | | | 6e−13 |
| 664, | NEQ340 | Predicted hydrolase | phosphoglycolate | 3.00E−03 | Hydrolase haloacid dehalogenase-like | | |
| 665 | | (HADsuperfamily) | phosphatase [Nostoc | | hydrolase 1.10e−07 | | |
| | | [Thermoplasma | sp. PCC 7120]. | | | | |
| 666, | NEQ339 | conserved | conserved | 1.00E−09 | Peptidase_M50 Peptidase | | Poorly |
| 667 | | hypothetical | hypothetical integral | | family M50 6.20e−05 | | characterized; |
| | | integralmembrane | membrane protein | | | | General |
| | | protein [M jannaschii] | [Methanococcus | | | | function |
| | | | jannaschii]. | | | | prediction |
| | | | | | | | only; Zn- |
| | | | | | | | dependent |
| | | | | | | | proteases 8e−11 |
| 668, | NEQ341 | primase DnaG-like | hypothetical protein | 3.00E−86 | Toprim Toprim | 2.7.7.— | Information |
| 669 | | [Pyrococcusabyssi] | [Pyrococcus furiosus | | domain 1.10e−06 | | storage and |
| | | | DSM 3638]. | | | | processing; DNA |
| | | | | | | | replication, |
| | | | | | | | recombination |
| | | | | | | | and |
| | | | | | | | repair; DNA |
| | | | | | | | primase |
| | | | | | | | (bacterial |
| | | | | | | | type) 1e−85 |
| 670, | NEQ342 | hypothetical | 409aa long | 1.00E−63 | Nop Putative snoRNA | | Information |
| 671 | | nucleolar protein | hypothetical nucleolar | | binding domain 9.50e−72 | | storage and |
| | | NOP56[Sulfolobus | protein [Sulfolobus | | | | processing; Translation, |
| | | tokodaii]; snoRNA | tokodaii]. | | | | ribosomal |
| | | | | | | | structure and |
| | | | | | | | biogenesis; Protein |
| | | | | | | | implicated in |
| | | | | | | | ribosomal |
| | | | | | | | biogenesis, |
| | | | | | | | Nop56p |
| | | | | | | | homolog 2e−63 |
| 672, | NEQ344 | small heat shock | small heat shock | 4.00E−13 | HSP20 Hsp20/alpha | | Cellular |
| 673 | | protein (class | protein (class I) | | crystallin family 1.10e−11 | | processes; Posttranslational |
| | | I)[Aquifex aeolicus] | [Aquifex aeolicus]. | | | | modification, |
| | | and other | | | | | protein |
| | | | | | | | turnover, |
| | | | | | | | chaperones; |
| | | | | | | | Molecular |
| | | | | | | | chaperone |
| | | | | | | | (small heat |
| | | | | | | | shock protein) |
| | | | | | | | 4e−14 |
| 674, | NEQ343 | intracellular protease | intracellular protease | 3.00E−07 | | | Poorly |
| 675 | | (Protease | [Pyrococcus abyssi]. | | | | characterized; |
| | | I)[Pyrococcus abyssi] | | | | | General |
| | | | | | | | function |
| | | | | | | | prediction |
| | | | | | | | only; Putative |
| | | | | | | | intracellular |
| | | | | | | | protease/amidase |
| | | | | | | | 2e−08 |
| 676, | NEQ345 | anaerobic | hypothetical protein | | 0 | 1.17. | Metabolism; Nucleotide |
| 677 | | ribonucleoside- | [Pyrococcus | | | 4.2 | transport and |
| | | triphosphatereductase | horikoshii]. | | | | metabolism; Oxygen- |
| | | [Pyrococcus | | | | | sensitive |
| | | abyssi] | | | | | ribonucleoside- |
| | | | | | | | triphosphate |
| | | | | | | | reductase 0 |
| 678, 679 | | putative | hypothetical protein | 8.00E−28 | Methyltransf_1 6-O- | 3.1.—.— | Information |
| | | endonuclease V | [Ferroplasma | | methylguanine DNA | | storage and |
| | | | acidarmanus]. | | methyltransferase, | | processing; DNA |
| | | | | | DNA binding domain | | replication, |
| | | | | | 2.30e−3 :Endonuc_V | | recombination |
| | | | | | Endonuclease V | | and |
| | | | | | 2.20e−29 | | repair; Deoxyinosine |
| | | | | | | | 3′endonuclease |
| | | | | | | | (endonuclease |
| | | | | | | | V) 3e−20 |
| 680, | NEQ346 | LSU Ribosomal | 50S ribosomal protein | 7.00E−09 | Ribosomal_LX Ribosomal | | Information |
| 681 | | protein L20A | LX [Pyrococcus | | LX protein 3.80e−10 | | storage and |
| | | | horikoshii]. | | | | processing; Translation, |
| | | | | | | | ribosomal |
| | | | | | | | structure and |
| | | | | | | | biogenesis; Ribosomal |
| | | | | | | | protein L20A |
| | | | | | | | (L18A) 4e−10 |
| 682, | NEQ347 | Predicted | conserved | 9.00E−44 | UPF0103 Protein of | | Poorly |
| 683 | | dioxygenase | hypothetical protein | | unknown function DUF52 | | characterized; |
| | | [Methanopyruskandleri | [Methanosarcina | | 4.10e−61 | | General |
| | | AV19] | acetivorans str. C2A]. | | | | function |
| | | | | | | | prediction |
| | | | | | | | only; Predicted |
| | | | | | | | dioxygenase |
| | | | | | | | 4e−39 |
| 684, | NEQ348 | putative archeal | archaeal histone A2 | 7.00E−12 | CBFD_NFYB_HMF Histone- | | Information |
| 685 | | histone | [Methanococcus | | like transcription factor | | storage and |
| | | | jannaschii]. | | (CBF/NF-Y) and archaeal | | processing; DNA |
| | | | | | histone 1.40e−21 | | replication, |
| | | | | | | | recombination |
| | | | | | | | and |
| | | | | | | | repair; Histones |
| | | | | | | | H3 and H4 |
| | | | | | | | 4e−13 |
| 686, | NEQ349 | ATP-dependent | ATP-dependent | 1.00E−177 | Sigma54_activat | 3.4.21. | Cellular |
| 687 | | protease La | protease Lon | | Sigma-54 interaction | 53 | processes; Posttranslational |
| | | (lon)[Archaeoglobus | [Thermococcus | | domain 5.40e−3 | | modification, |
| | | fulgidus] | kodakaraensis]. | | :lon_rel lon_rel | | protein |
| | | | | | ATP-dependent | | turnover, |
| | | | | | protease, putative | | chaperones; Predicted |
| | | | | | 8.40e−219 : 8.60e−11 | | ATP- |
| | | | | | | | dependent |
| | | | | | | | protease 1e−173 |
| 688, | NEQ350 | Predicted aromatic | Predicted aromatic | 8.00E−15 | DUF59 Domain of | 2.3.1. | Poorly |
| 689 | | ring | ring hydroxylating | | unknown function | 30 | characterized; |
| | | hydroxylatingenzyme | enzyme | | DUF59 2.50e−15 | | General |
| | | [Thermoplasma | [Thermoplasma | | | | function |
| | | volcanium] | volcanium]. | | | | prediction |
| | | | | | | | only; Predicted |
| | | | | | | | metal-sulfur |
| | | | | | | | cluster |
| | | | | | | | biosynthetic |
| | | | | | | | enzyme 5e−16 |
| 690, | NEQ351 | Predicted | hypothetical protein | 8.00E−03 | 0 | | |
| 691 | | transcriptional | [Pyrococcus furiosus | | | | |
| | | regulator | DSM 3638]. | | | | |
| 692, | NEQ352 | putative ABC | hypothetical protein | 1.00E−13 | DUF63 Membrane protein of | | Poorly |
| 693 | | transporter, transmembrane | [Pyrococcus furiosus | | unknown function DUF63 | | characterized; |
| | | component | DSM 3638]. | | 3.40e−4 | | Function |
| | | [P. | | | | | unknown; Predicted |
| | | | | | | | membrane |
| | | | | | | | proteins 2e−12 |
| 694, | NEQ353 | hypothetical protein | hypothetical protein | 5.00E−27 | 0 | | Poorly |
| 695 | | | [Archaeoglobus | | | | characterized; |
| | | | fulgidus]. | | | | General |
| | | | | | | | function |
| | | | | | | | prediction |
| | | | | | | | only; Predicted |
| | | | | | | | nucleic acid |
| | | | | | | | binding |
| | | | | | | | protein |
| | | | | | | | containing the |
| | | | | | | | AN1-type Zn- |
| | | | | | | | finger 3e−28 |
| 696, | NEQ354 | hypothetical protein | hypothetical protein | 1.00E−03 | 0 | | |
| 697 | | | [Plasmodium | | | | |
| | | | falciparum 3D7]. | | | | |
| 698, | NEQ356 | hypothetical | hypothetical protein | 0.01 | 0 | | |
| 699 | | proteinputative | [Plasmodium | | | | |
| | | vitamin B12 | falciparum 3D7]. | | | | |
| | | transporter? | | | | | |
| 700, | NEQ355 | predicted | conserved | 8.00E−11 | 0 | | Information |
| 701 | | transcriptional | hypothetical protein | | | | storage and |
| | | regulator | [Archaeoglobus | | | | processing; Transcription; |
| | | | fulgidus]. | | | | Predicted |
| | | | | | | | transcriptional |
| | | | | | | | regulator |
| | | | | | | | containing an |
| | | | | | | | HTH domain |
| | | | | | | | fused to a Zn- |
| | | | | | | | ribbon 4e−12 |
| 702, | NEQ358 | Predicted calcineurin | hypothetical protein | 6.00E−52 | Metallophos Calcineurin-like | | Poorly |
| 703 | | superfamilyphosphoesterase | [Pyrococcus abyssi]. | | phosphoesterase 4.80e−07 | | characterized; |
| | | [M. kandleri] | | | :TIGR00024 TIGR00024 | | General |
| | | | | | conserved hypothetical | | function |
| | | | | | protein TIGR00024 5.00e−38 | | prediction |
| | | | | | | | only; Predicted |
| | | | | | | | ICC-like |
| | | | | | | | phosphoesterases |
| | | | | | | | 4e−53 |
| 704, | NEQ357 | hypothetical protein | M. jannaschii | 0.05 | 0 | | |
| 705 | | | predicted coding | | | | |
| | | | region MJECL28 | | | | |
| | | | [Methanococcus | | | | |
| | | | jannaschii]. | | | | |
| 706, | NEQ359 | SSU Ribosomnal | SSU ribosomal | 1.00E−20 | Ribosomal_S28e Ribosomal | | Information |
| 707 | | protein S28E | protein S28E | | protein S28e 3.70e−32 | | storage and |
| | | | [Pyrococcus abyssi]. | | | | processing; Translation, |
| | | | | | | | ribosomal |
| | | | | | | | structure and |
| | | | | | | | biogenesis; Ribosomal |
| | | | | | | | protein |
| | | | | | | | S28E/S33 8e−22 |
| 708, | NEQ361 | LSU ribosomal | LSU ribosomal protein | 4.00E−66 | Ribosomal_L2 Ribosomal | | Information |
| 709 | | protein | L2P [Pyrococcus | | Proteins L2, RNA binding | | storage and |
| | | L2P[Pyrococcus | abyssi] | | domain 1.70e−10 :rplB_bact | | processing; Translation, |
| | | abyssi] | | | rplB_bact ribosomal protein | | ribosomal |
| | | | | | L2 3.00e−08 :FOLD1900 No | | structure and |
| | | | | | CATH Annotation 2.20e−12 | | biogenesis; Ribosomal |
| | | | | | :Ribosomal_L2_C | | protein L2 3e−67 |
| | | | | | Ribosomal Proteins L2, C- | | |
| | | | | | terminal domain 1.10e−46 | | |
| 710, | NEQ360 | Glu-tRNA | Glu-tRNA | 3.00E−80 | Amidase Amidase | 6.3.5.— | Information |
| 711 | | amidotransferase, | amidotransferase, | | 5.80e−87 :gatA gatA | | storage and |
| | | subunitA (gatA-2) | subunit A (gatA-2) | | glutamyl-tRNA(Gln) | | processing; Translation, |
| | | [Archaeoglobus | [Archaeoglobus | | amidotransferase, A | | ribosomal |
| | | fulgidus] | fulgidus]. | | subunit 6.20e−105 | | structure and |
| | | | | | | | biogenesis; Asp- |
| | | | | | | | tRNAAsn/Glu- |
| | | | | | | | tRNAGln |
| | | | | | | | amidotransferase |
| | | | | | | | A subunit |
| | | | | | | | and related |
| | | | | | | | amidases 2e−81 |
| 712, | NEQ362 | hypothetical protein | hypothetical protein | 4.00E−03 | NTP_transf_2 Nucleotidyltransferase | | |
| 713 | | | [Pyrococcus furiosus | | domain 2.60e−3 | | |
| | | | DSM 3638]. | | | | |
| 714, | NEQ363 | Archaea-specific | hypothetical protein | 5.00E−20 | DUF78 Protein of unknown | | Information |
| 715 | | DNA-bindingprotein | [Pyrococcus | | function DUF78 5.40e−34 | | storage and |
| | | [Methanopyrus | horikoshii]. | | :TIGR00285 TIGR00285 | | processing; Transcription; |
| | | kandleri] | | | conserved hypothetical | | Archaeal |
| | | | | | protein TIGR00285 3.90e−35 | | DNA- |
| | | | | | | | binding |
| | | | | | | | protein 3e−21 |
| 716, | NEQ364 | LSU Ribosomal | LSU ribosomal protein | 2.00E−12 | Ribosomal_L31e Ribosomal | | Information |
| 717 | | proten L31E | L31E [Methanococcus | | protein L31e 1.20e−11 | | storage and |
| | | | jannaschii]. | | | | processing; Translation, |
| | | | | | | | ribosomal |
| | | | | | | | structure and |
| | | | | | | | biogenesis; Ribosomal |
| | | | | | | | protein L31E |
| | | | | | | | 1e−13 |
| 718, | NEQ365 | hypothetical protein | hypothetical protein | 9.00E−15 | | 3.1.11.— | Information |
| 719 | | | [Plasmodium | | | | storage and |
| | | | falciparum 3D7]. | | | | processing; DNA |
| | | | | | | | replication, |
| | | | | | | | recombination |
| | | | | | | | and |
| | | | | | | | repair; ATPase |
| | | | | | | | involved in |
| | | | | | | | DNA repair |
| | | | | | | | 9e−14 |
| 720, | NEQ366 | GTP-binding protein | GTP-binding protein | 1.00E−39 | MMR_HSR1 GTPase of | | Poorly |
| 721 | | [Pyrococcushorikoshii] | [Pyrococcus | | unknown function 4.00e−25 | | characterized; |
| | | | horikoshii]. | | :MG442 MG442 GTP- | | General |
| | | | | | binding conserved | | function |
| | | | | | hypothetical protein 1.50e−13 | | prediction |
| | | | | | | | only; Predicted |
| | | | | | | | GTPases |
| | | | | | | | 7e−41 |
| 722, | NEQ367 | nucleotidyltransferase | 176aa long conserved | 9.00E−03 | CTP_transf_2 Cytidylyltransferase 6.60e−06 | | |
| 723 | | [Pyrococcus furiosus | hypothetical protein | | | | |
| | | DSM 3638] | [Sulfolobus tokodaii]. | | | | |
| 724, | NEQ368 | DNA-(apurinic or | M. jannaschii | 4.00E−48 | AP_endonuc_2 AP endonuclease | | |
| 725 | | apyrimidinic | predicted coding | | family 2 1.80e−3 | | |
| | | site)lyase | region MJ1455 | | | | |
| | | (endonuclease IV) | [Methanococcus | | | | |
| | | | jannaschii]. | | | | |
| 726, | NEQ369 | DNA repair protein | ATP-dependent | 3.00E−33 | DEAD DEAD/DEAH | 2.7.7.— | Information |
| 727 | | RAD25[Pyrococcus | helicase, putative | | box helicase 1.60e−11 | | storage and |
| | | abyssi] | [Sulfolobus | | :helicase_C | | processing; DNA |
| | | | solfataricus]. | | Helicase conserved | | replication, |
| | | | | | C-terminal domain | | recombination |
| | | | | | 8.30e−10 :SNF2_N | | and |
| | | | | | SNF2 family N- | | repair; DNA or |
| | | | | | terminal domain | | RNA |
| | | | | | 8.00e−3 | | helicases of |
| | | | | | | | superfamily II |
| | | | | | | | 5e−25 |
| 728, | NEQ370 | DNA-directed RNA | DNA-directed RNA | 5.00E−39 | S1 S1 RNA binding | 2.7.7.6 | Information |
| 729 | | polymerase, subunit | polymerase, subunit E | | domain 1.90e−10 | | storage and |
| | | E′ (rpoE1) [M. jannaschii] | (rpoE1) | | :rpoE rpoE DNA- | | processing; Transcription; |
| | | | [Methanococcus | | directed RNA | | DNA- |
| | | | jannaschii]. | | polymerase 2.80e−47 | | directed |
| | | | | | :RNA_pol_Rpb7_N | | RNA |
| | | | | | RNA polymerase | | polymerase |
| | | | | | Rpb7, N-terminal | | subunit E 4e−40 |
| | | | | | domain 4.60e−22 | | |
| 730, | NEQ372 | hypothetical DNA- | 220aa long | 5.00E−57 | UDG Uracil DNA | 2.7.7.7 | Information |
| 731 | | directed | hypothetical DNA- | | glycosylase | | storage and |
| | | DNApolymerase, | directed DNA | | superfamily 1.20e−37 | | processing; DNA |
| | | bacteriophage-type | polymerase, | | :SPO1polNrel | | replication, |
| | | | bacteriophage-type | | SPO1polNrel phage | | recombination |
| | | | [Sulfolobus tokodaii]. | | SPO1 DNA | | and |
| | | | | | polymerase-related | | repair; Uracil- |
| | | | | | protein 8.30e−94 | | DNA |
| | | | | | | | glycosylase |
| | | | | | | | 6e−54 |
| 732, | NEQ371 | conserved | Hypothetical protein | 7.00E−25 | | 3.1.3.3 | Poorly |
| 733 | | hypothetical | [Sulfolobus | | | | characterized; |
| | | protein[Sulfolobus | solfataricus]. | | | | Function |
| | | solfataricus] | | | | | unknown; Uncharacterized |
| | | | | | | | archaeal |
| | | | | | | | coiled-coil |
| | | | | | | | domain 4e−24 |
| 734, | NEQ373 | ferredoxin1 [3Fe-4S] - | FERREDOXIN. | 3.00E−07 | fer4 4Fe-4S binding domain | | Metabolism; Energy |
| 735 | | Thermococcuslitoralis | | | 3.00e−3 | | production |
| | | | | | | | and |
| | | | | | | | conversion; Ferredoxin |
| | | | | | | | 1 6e−07 |
| 736, | NEQ375 | SSU Ribosomal | Ribosomal protein | 2.00E−23 | Ribosomal_S3Ae Ribosomal | | Information |
| 737 | | protein | S3AE [Methanopyrus | | S3Ae family 5.80e−15 | | storage and |
| | | S3AE[Methanopyrus | kandleri AV19]. | | | | processing; Translation, |
| | | kandleri AV19] | | | | | ribosomal |
| | | | | | | | structure and |
| | | | | | | | biogenesis; Ribosomal |
| | | | | | | | protein S3AE |
| | | | | | | | 3e−23 |
| 738, | NEQ376 | hypothetical protein | Unknown (protein for | 0.29 | 0 | | |
| 739 | | | MGC: 27006) [Homo | | | | |
| | | | sapiens]. | | | | |
| 740, | NEQ377 | DNA-directed RNA | 112aa long | 8.00E−23 | RNA_POL_M_15 KD | 2.7.7.6 | Information |
| 741 | | polymerasesubunit | hypothetical DNA- | | RNA polymerases | | storage and |
| | | M [Sulfolobus | directed RNA | | M/15 Kd subunit | | processing; Transcription; |
| | | tokodaii] | polymerase subunit M | | 7.60e−08 :TFIIS | | DNA- |
| | | | [Sulfolobus tokodaii]. | | Transcription factor | | directed |
| | | | | | S-II (TFIIS) 2.50e−15 | | RNA |
| | | | | | | | polymerase |
| | | | | | | | subunit |
| | | | | | | | M/Transcription |
| | | | | | | | elongation |
| | | | | | | | factor TFIIS |
| | | | | | | | 5e−21 |
| 742, | NEQ378 | Predicted Zn- | hypothetical protein | 1.00E−54 | lactamase_B Metallo-beta- | | Poorly |
| 743 | | dependent hydrolase | [Pyrococcus abyssi]. | | lactamase superfamily | | characterized; |
| | | ofthe beta-lactamase | | | 9.80e−11 | | General |
| | | superfamily | | | | | function |
| | | | | | | | prediction |
| | | | | | | | only; Predicted |
| | | | | | | | Zn- |
| | | | | | | | dependent |
| | | | | | | | hydrolases of |
| | | | | | | | the beta- |
| | | | | | | | lactamase |
| | | | | | | | fold 7e−56 |
| 744, | NEQ379 | LSU ribosomal | 50S ribosomal protein | 2.00E−42 | Ribosomal_L19e Ribosomal | | Information |
| 745 | | protein | L19 [Pyrococcus | | protein L19e 6.10e−67 | | storage and |
| | | L19E[Pyrococcus | horikoshii]. | | | | processing; Translation, |
| | | horikoshii] | | | | | ribosomal |
| | | | | | | | structure and |
| | | | | | | | biogenesis; Ribosomal |
| | | | | | | | protein L19E |
| | | | | | | | 3e−43 |
| 746, | NEQ380 | hypothetical protein | hypothetical protein | 4.00E−03 | 0 | | |
| 747 | | | [Plasmodium | | | | |
| | | | falciparum 3D7]. | | | | |
| 748, | NEQ381 | pyruvate fromate- | PYRUVATE | 4.00E−71 | Radical_SAM | 1.97. | Cellular |
| 749 | | lyase | FORMATE-LYASE | | Radical SAM | 1.4 | processes; Posttranslational |
| | | activatingenzyme | ACTIVATING | | superfamily 4.30e−15 | | modification, |
| | | related protein [P. abyssi] | ENZYME RELATED | | | | protein |
| | | | PROTEIN | | | | turnover, |
| | | | [Pyrococcus abyssi]. | | | | chaperones; Pyruvate- |
| | | | | | | | formate |
| | | | | | | | lyase- |
| | | | | | | | activating |
| | | | | | | | enzyme 3e−72 |
| 750, | NEQ383 | DNA repair protein | hypothetical protein | 1.00E−13 | Metallophos Calcineurin-like | | Information |
| 751 | | RAD32[Pyrococcus | [Pyrococcus | | phosphoesterase 7.10e−15 | | storage and |
| | | abyssi] | horikoshii]. | | :sbcd sbcd exonuclease | | processing; DNA |
| | | | | | SbcD 5.60e−05 | | replication, |
| | | | | | | | recombination |
| | | | | | | | and |
| | | | | | | | repair; DNA |
| | | | | | | | repair |
| | | | | | | | exonuclease |
| | | | | | | | 8e−15 |
| 752, | NEQ382 | Predicted Fe—S | hypothetical protein | 1.00E−73 | Radical_SAM Radical SAM | | Metabolism; Energy |
| 753 | | oxidoreductase[Thermoplasma | [Pyrococcus furiosus | | superfamily 7.50e−15 | | production |
| | | volcanium] | DSM 3638]. | | | | and |
| | | | | | | | conversion; Fe—S |
| | | | | | | | oxidoreductases |
| | | | | | | | 2e−74 |
| 754, | NEQ384 | SpoU rRNA | spoU protein homolog | 1.00E−36 | SpoU_methylase | 2.1.1.— | Information |
| 755 | | methylase[Methanos | [imported] - | | SpoU rRNA | | storage and |
| | | arcina acetivorans | Pyrococcus sp. | | Methylase family | | processing; Translation, |
| | | str. C2A] | | | 1.60e−07 | | ribosomal |
| | | | | | :rRNA_methyl_1 | | structure and |
| | | | | | rRNA_methyl_1 | | biogenesis; rRNA |
| | | | | | RNA | | methylase |
| | | | | | methyltransferase, | | 5e−32 |
| | | | | | TrmH family, group | | |
| | | | | | 1 5.10e−40 | | |
| | | | | | :rRNA_methyl_2 | | |
| | | | | | rRNA_methyl_2 | | |
| | | | | | RNA | | |
| | | | | | methyltransferase, | | |
| | | | | | TrmH family, group | | |
| | | | | | 2 2.30e−3 | | |
| 756, | NEQ386 | hypothetical protein | conserved | 7.00E−06 | DUF153 MTH1175-like domain | | |
| 757 | | [Pyrococcusabyssi] | hypothetical protein | | (DUF153/COG1433) 2.70e−05 | | |
| | | | [Thermoanaerobacter | | | | |
| | | | tengcongensis]. | | | | |
| 758, | NEQ385 | conserved | hypothetical protein | 1.00E−05 | DUF232 Putative transcriptional | | |
| 759 | | hypothetical | [Aeropyrum pernix]. | | regulator 4.40e−11 | | |
| | | protein[Aeropyrum | | | | | |
| | | pernix] | | | | | |
| 760, | NEQ387 | ATP-dependent RNA | ATP-dependent RNA | 1.00E−127 | DEAD DEAD/DEAH | 2.7.7.— | Information |
| 761 | | helicase, EIF- | helicase, EIF-4A | | box helicase 8.30e−08 | | storage and |
| | | 4AFAMILY | FAMILY [Pyrococcus | | :ERCC4 ERCC4 | | processing; DNA |
| | | [Pyrococcus abyssi] | abyssi]. | | domain 8.70e−23 | | replication, |
| | | | | | :helicase_C | | recombination |
| | | | | | Helicase conserved | | and |
| | | | | | C-terminal domain | | repair; ERCC4- |
| | | | | | 9.30e−25 :SNF2_N | | like helicases |
| | | | | | SNF2 family N- | | 3e−97 |
| | | | | | terminal domain | | |
| | | | | | 1.40e−3 | | |
| 762, | NEQ388 | SSU ribosomal | ribosomal protein S5 | 2.00E−55 | Ribosomal_S5 Ribosomal | | Information |
| 763 | | protein | [Pyrobaculum | | protein S5, N-terminal | | storage and |
| | | S5[Pyrobaculum | aerophilum]. | | domain 1.40e−10 :rpsE_arch | | processing; Translation, |
| | | aerophilum] | | | rpsE_arch ribosomal protein | | ribosomal |
| | | | | | S5 4.10e−97 :rpsE_bact | | structure and |
| | | | | | rpsE_bact ribosomal protein | | biogenesis; Ribosomal |
| | | | | | S5 4.80e−12 | | protein S5 2e−56 |
| | | | | | :Ribosomal_S5_C | | |
| | | | | | Ribosomal protein S5, C- | | |
| | | | | | terminal domain 7.30e−21 | | |
| 764, | NEQ389 | tyrosyl-tRNA | tyrosyl-tRNA | 1.00E−100 | tRNA-synt_1b tRNA | 6.1.1.1 | Information |
| 765 | | synthetase (class | synthetase | | synthetases class I | | storage and |
| | | 1b)[Pyrococcus | [Pyrococcus furiosus | | (W and Y) 7.60e−54 | | processing; Translation, |
| | | furiosus] | DSM 3638]. | | :tyrS tyrS tyrosyl- | | ribosomal |
| | | | | | tRNA synthetase | | structure and |
| | | | | | 6.40e−17 | | biogenesis; Tyrosyl- |
| | | | | | | | tRNA |
| | | | | | | | synthetase |
| | | | | | | | 1e−100 |
| 766, | NEQ392 | hypothetical protein | potassium channel | 0.14 | 0 | | |
| 767 | | | subunit [Gallus | | | | |
| | | | gallus]. | | | | |
| 768, | NEQ391 | hypothetical protein | AMV156 [Amsacta | 7.00E−10 | 0 | | |
| 769 | | | moorei | | | | |
| | | | entomopoxvirus]. | | | | |
| 770, | NEQ393 | translation initiation | translation initiation | 1.00E−19 | eIF_5A eIF_5A translation | | Information |
| 771 | | factor eIF-5A(eif5A) | factor eIF-5A (eif5A) | | initiation factor eIF-5A 8.80e−21 | | storage and |
| | | [Archaeoglobus | [Archaeoglobus | | | | processing; Translation, |
| | | fulgidus] | fulgidus]. | | | | ribosomal |
| | | | | | | | structure and |
| | | | | | | | biogenesis; Translation |
| | | | | | | | elongation |
| | | | | | | | factor |
| | | | | | | | P/translation |
| | | | | | | | initiation |
| | | | | | | | factor eIF-5A |
| | | | | | | | 2e−20 |
| 772, | NEQ396 | Glu-tRNA | Glu-tRNA | 3.00E−49 | GAD GAD domain | 6.3.5.— | Information |
| 773 | | amidotransferase | amidotransferase | | 1.30e−4 :GatB | | storage and |
| | | (gatE) | (gatB) | | PET112 family, C | | processing; Translation, |
| | | | [Methanococcus | | terminal region | | ribosomal |
| | | | jannaschii]. | | 5.50e−06 :gatB_rel | | structure and |
| | | | | | gatB_rel aspartyl- | | biogenesis; Archaeal |
| | | | | | tRNA(Asn) | | Glu- |
| | | | | | amidotransferase, B | | tRNAGln |
| | | | | | subunit, putative | | amidotransferase |
| | | | | | 1.70e−46 | | subunit E |
| | | | | | | | (contains |
| | | | | | | | GAD domain) |
| | | | | | | | 2e−50 |
| 774, | NEQ395 | hypothetical protein | conserved | 4.00E−05 | primase_sml primase_sml DNA primase, | | |
| 775 | | | hypothetical protein | | eukaryotic-type, small subunit, | | |
| | | | [Thermoplasma | | putative 4.30e−4 | | |
| | | | acidophilum]. | | | | |
| 776, | NEQ397 | LSU ribosomal | LSU ribosomal protein | 9.00E−25 | Ribosomal_L21e Ribosomal | | Information |
| 777 | | protein | L21E; (rpl21E) | | protein L21e 2.20e−25 | | storage and |
| | | L21E; (rpl21E) | [Pyrococcus furiosus | | | | processing; Translation, |
| | | [Pyrococcus | DSM 3638]. | | | | ribosomal |
| | | furiosus] | | | | | structure and |
| | | | | | | | biogenesis; Ribosomal |
| | | | | | | | protein L21E |
| | | | | | | | 2e−25 |
| 778, | NEQ398 | endonuclease III | endonuclease III | 4.00E−40 | HhH-GPD HhH- | 4.2.99. | Information |
| 779 | | [Aquifexaeolicus]Split; | [Aquifex aeolicus]. | | GPD superfamily | 18 | storage and |
| | | see SEQ ID | | | base excision DNA | | processing; DNA |
| | | NOS: 254, 255 | | | repair protein 2.00e−17 | | replication, |
| | | | | | :nth nth | | recombination |
| | | | | | endonuclease III | | and |
| | | | | | 2.80e−40 | | repair; Predicted |
| | | | | | | | EndoIII- |
| | | | | | | | related |
| | | | | | | | endonuclease |
| | | | | | | | 3e−41 |
| 780, | NEQ399 | methionine | methionine | 2.00E−58 | Peptidase_M24 | 3.4.11. | Information |
| 781 | | aminopeptidase | aminopeptidase (map) | | metallopeptidase | 18 | storage and |
| | | (map)(EC 3.4.11.18) | (EC 3.4.11.18) | | family M24 6.00e−12 | | processing; Translation, |
| | | [Pyrococcus abyssi] | [Pyrococcus abyssi]. | | :crvDNA_42K | | ribosomal |
| | | | | | crvDNA_42K DNA- | | structure and |
| | | | | | binding protein, 42 kDa | | biogenesis; Methionine |
| | | | | | 3.60e−4 | | aminopeptidase |
| | | | | | :met_pdase_I | | 2e−59 |
| | | | | | met_pdase_I | | |
| | | | | | methionine | | |
| | | | | | aminopeptidase, | | |
| | | | | | type I 1.80e−11 | | |
| | | | | | :met_pdase_II | | |
| | | | | | met_pdase_II | | |
| | | | | | methionine | | |
| | | | | | aminopeptidase, | | |
| | | | | | type II 8.20e−81 | | |
| 782, | NEQ401 | Mg-chelatase | Mg-chelatase subunit | 2.00E−77 | AAA ATPase family | | Metabolism; Coenzyme |
| 783 | | subunit Chll and | Chll and Chld (MoxR- | | associated with various | | metabolism; Mg- |
| | | Chld(MoxR-like | like ATPase and vWF | | cellular activities (AAA) | | chelatase |
| | | ATPase and vWF | domain) | | 6.90e−06 :Mg_chelatase | | subunit Chll |
| | | | [Methanopyrus | | Magnesium chelatase, | | 5e−36 |
| | | | kandleri AV19]. | | subunit Chll 3.60e−08 | | |
| | | | | | :Sigma54_activat Sigma-54 | | |
| | | | | | interaction domain 3.10e−3 | | |
| 784, | NEQ403 | hypothetical protein | conserved | 4.00E−05 | vwa von Willebrand factor type | | |
| 785 | | | hypothetical protein | | A domain 1.70e−3 | | |
| | | | [Chlorobium tepidum | | | | |
| | | | TLS]. | | | | |
| 786, | NEQ402 | deoxyhypusine | deoxyhypusine | 4.00E−89 | DS Deoxyhypusine | 2.5.1. | Information |
| 787 | | synthase | synthase related | | synthase 5.90e−73 | 46 | storage and |
| | | (catalyzingalso the | protein | | :dhys dhys | | processing; Translation, |
| | | synthesis of | [Thermoplasma | | deoxyhypusine | | ribosomal |
| | | homospermidine) | acidophilum]. | | synthase, putative | | structure and |
| | | | | | 8.50e−67 | | biogenesis; Deoxyhypusine |
| | | | | | | | synthase 3e−90 |
| 788, | NEQ404 | hypothetical protein | Uncharacterized | 0.01 | 0 | | |
| 789 | | | protein conserved in | | | | |
| | | | bacteria | | | | |
| | | | [Wigglesworthia | | | | |
| | | | brevipalpis]. | | | | |
| 790, | NEQ405 | Translation initiation | Translation initiation | 1.00E−30 | S1 S1 RNA binding domain | | Information |
| 791 | | factor eIF2- | factor eIF2-alpha | | 7.60e−07 | | storage and |
| | | alpha[Methanopyrus | [Methanopyrus | | | | processing; Translation, |
| | | kandleri AV19] | kandleri AV19]. | | | | ribosomal |
| | | | | | | | structure and |
| | | | | | | | biogenesis; Translation |
| | | | | | | | initiation |
| | | | | | | | factor |
| | | | | | | | eIF2alpha 2e−29 |
| 792, | NEQ406 | hypothetical | similar to | 3.00E−06 | 0 | | |
| 793 | | proteinsimilar to | phosphoenolpyruvate | | | | |
| | | PEP-kinase | synthase [Nostoc sp. | | | | |
| | | | PCC 7120]. | | | | |
| 794, | NEQ408 | hypothetical protein | hypothetical protein | 0.01 | 0 | | |
| 795 | | | [Aeropyrum pernix]. | | | | |
| 796, | NEQ407 | hypothetical protein | hypothetical protein | 2.00E−04 | 0 | | |
| 797 | | | [Streptococcus | | | | |
| | | | mutans UA159]. | | | | |
| 798, | NEQ409 | large helicase- | large helicase-related | 8.00E−68 | 0 | 3.6.1.— | Poorly |
| 799 | | related protein; (lhr- | protein; (lhr-2) | | | | characterized; |
| | | 2) | [Pyrococcus furiosus | | | | General |
| | | | DSM 3638]. | | | | function |
| | | | | | | | prediction |
| | | | | | | | only; Lhr-like |
| | | | | | | | helicases 4e−68 |
| 800, | NEQ410 | V-type ATP synthase | hypothetical protein | 8.00E−34 | V_ATPase_sub_a | 3.6.3. | Metabolism; Energy |
| 801 | | subunit I (V- | [Clostridium | | V-type ATPase | 14 | production |
| | | typeATPase subunit | thermocellum ATCC | | 116 kDa subunit | | and |
| | | I) [Pc. abyssi] | 27405]. | | family 7.40e−11 | | conversion; Archaeal/ |
| | | | | | | | vacuolar- |
| | | | | | | | type H+- |
| | | | | | | | ATPase |
| | | | | | | | subunit I 8e−33 |
| 802, | NEQ411 | DNA-directed RNA | Chain F, Structure Of | 4.00E−06 | RNA_pol_Rpb4 RNA | | Poorly |
| 803 | | polymerase, subunit | An Archeal Homolog | | polymerase Rpb4 1.60e−4 | | characterized; |
| | | F (rpoF) [S. solfataricus] | Of The Eukaryotic | | | | Function |
| | | | Rna Polymerase li | | | | unknown; Uncharacterized |
| | | | Rpb4RPB7 | | | | ArCR 2e−07 |
| | | | COMPLEX. | | | | |
| 804, | NEQ412 | leucine | leucine | 1.00E−67 | Peptidase_M17 | 3.4.11.1 | Metabolism; Amino |
| 805 | | aminopeptidase | aminopeptidase | | Cytosol | | acid |
| | | [Clostridiumperfringens] | [Clostridium | | aminopeptidase | | transport and |
| | | | perfringens]. | | family, catalytic | | metabolism; Leucyl |
| | | | | | domain 5.10e−123 | | aminopeptidase |
| | | | | | | | 5e−64 |
| 806, | NEQ413 | hypothetical protein | hypothetical protein | 0.91 | 0 | | |
| 807 | | | [Enterococcus | | | | |
| | | | faecium]. | | | | |
| 808, | NEQ415 | hypothetical protein | 185aa long | 2.00E−11 | 0 | | |
| 809 | | [Sulfolobus tokodaii] | hypothetical protein | | | | |
| | | | [Sulfolobus tokodaii]. | | | | |
| 810, | NEQ414 | Archaeal ATP | hypothetical protein | 5.00E−20 | 0 | | Poorly |
| 811 | | dependent | [Pyrococcus furiosus | | | | characterized; |
| | | serineprotease | DSM 3638]. | | | | General |
| | | {secretory signal | | | | | function |
| | | sequence} | | | | | prediction |
| | | | | | | | only; Archaeal |
| | | | | | | | serine |
| | | | | | | | proteases 5e−21 |
| 812, | NEQ416 | hypothetical protein | Predicted ATPase | 0.06 | 0 | | |
| 813 | | | involved in biogenesis | | | | |
| | | | of flagella | | | | |
| | | | [Thermoplasma | | | | |
| | | | volcanium]. | | | | |
| 814, | NEQ417 | glycyl-tRNA | glycyl-tRNA | 2.00E−98 | HGTP_anticodon | 6.1.1. | Information |
| 815 | | synthetase (class | synthetase | | Anticodon binding | 14 | storage and |
| | | 2)[Pyrococcus | [Pyrococcus abyssi]. | | domain 4.00e−30 | | processing; Translation, |
| | | abyssi] | | | :tRNA-synt_2b tRNA | | ribosomal |
| | | | | | synthetase class II | | structure and |
| | | | | | core domain (G, H, | | biogenesis; Glycyl- |
| | | | | | P, S and T) 3.40e−41 | | tRNA |
| | | | | | :glyS_dimeric | | synthetase, |
| | | | | | glyS_dimeric glycyl- | | class II 1e−99 |
| | | | | | tRNA synthetase | | |
| | | | | | 2.00e−151 | | |
| 816, | NEQ418 | hypothetical protein | hypothetical protein | 0.02 | 0 | | |
| 817 | | | [Plasmodium | | | | |
| | | | falciparum 3D7]. | | | | |
| 818, | NEQ420 | DNA polymerase II | DNA polymerase II | 0 | polC polC DNA | 2.7.7.7 | Information |
| 819 | | subunit 2 | subunit 2 [Pyrococcus | | polymerase II, large | | storage and |
| | | (largesubunit) | furiosus DSM 3638]. | | subunit DP2 0.0 | | processing; DNA |
| | | [Pyrococcus | | | :PolC_DP2 DNA | | replication, |
| | | furiosus] | | | polymerase II large | | recombination |
| | | | | | subunit DP2 4.60e−283 | | and repair; NA |
| | | | | | | | polymerase II |
| | | | | | | | large subunit 0 |
| 820, | NEQ419 | hypothetical protein | hypothetical protein | 3.00E−07 | 0 | | Poorly |
| 821 | | [Pyrococcus horikoshii] | [Pyrococcus | | | | characterized; |
| | | | horikoshii]. | | | | Function |
| | | | | | | | unknown; Uncharacterized |
| | | | | | | | ArCR 2e−08 |
| 822, | NEQ421 | ATPase subunit of a | ABC transporter, | 1.00E−56 | ABC_tran ABC | 1.8.—.— | Poorly |
| 823 | | ABC-typetransport | ATP-binding protein | | transporter 2.00e−58 | | characterized; |
| | | system involved in | [Methanosarcina | | :3a0501s02 | | General |
| | | | acetivorans str. C2A]. | | 3a0501s02 Type II | | function |
| | | | | | (General) Secretory | | prediction |
| | | | | | Pathway (IISP) | | only; ABC- |
| | | | | | Family protein | | type transport |
| | | | | | 1.80e−55 | | systems, |
| | | | | | :3a0106s01 | | involved in |
| | | | | | 3a0106s01 sulfate | | lipoprotein |
| | | | | | transport system | | release, |
| | | | | | permease protein | | ATPase |
| | | | | | 3.70e−46 :cbiO cbiO | | components |
| | | | | | cobalt transport | | 1e−55 |
| | | | | | protein ATP-binding | | |
| | | | | | subunit 2.80e−16 | | |
| | | | | | :ntrCD ntrCD nitrate | | |
| | | | | | transport ATP- | | |
| | | | | | binding subunits C | | |
| | | | | | and D 8.00e−20 | | |
| | | | | | :proV proV glycine | | |
| | | | | | betaine/L-proline | | |
| | | | | | transport ATP | | |
| | | | | | binding subunit | | |
| | | | | | 4.10e−09 :potA potA | | |
| | | | | | spermidine/putrescine | | |
| | | | | | ABC transporter | | |
| | | | | | ATP-binding subunit | | |
| | | | | | 1.10e−09 :drrA drrA | | |
| | | | | | daunorubicin | | |
| | | | | | resistance ABC | | |
| | | | | | transporter ATP- | | |
| | | | | | binding subunit | | |
| | | | | | 1.90e−10 :ccmA | | |
| | | | | | ccmA heme | | |
| | | | | | exporter protein | | |
| | | | | | CcmA 3.80e−14 | | |
| | | | | | :thiQ thiQ ABC | | |
| | | | | | transporter, ATP- | | |
| | | | | | binding protein, | | |
| | | | | | ThiQ subfamily | | |
| | | | | | 3.80e−16 :nodl nodl | | |
| | | | | | nodulation ABC | | |
| | | | | | transporter Nodl | | |
| | | | | | 2.70e−05 | | |
| 824, | NEQ422 | DIPHTIN | DIPHTIN SYNTHASE | 5.00E−22 | TP_methylase | 2.1.1. | Information |
| 825 | | SYNTHASE[Encephalitozoon | [Encephalitozoon | | Tetrapyrrole | 98 | storage and |
| | | cuniculi] | cuniculi]. | | (Corrin/Porphyrin) | | processing; Translation, |
| | | | | | Methylases 5.70e−4 | | ribosomal |
| | | | | | :dph5 dph5 | | structure and |
| | | | | | diphthine synthase | | biogenesis; Diphthamide |
| | | | | | 3.40e−13 | | biosynthesis |
| | | | | | | | methyltransferase |
| | | | | | | | DPH5 |
| | | | | | | | 8e−20 |
| 826, | NEQ424 | Holliday-junction | conserved protein | 1.00E−08 | Hjc Archaeal holliday | | Information |
| 827 | | resolvase[Sulfolobus | [Methanothermobacter | | junction resolvase (hjc) | | storage and |
| | | solfataricus] | thermautotrophicus]. | | 1.70e−18 | | processing; DNA |
| | | | | | | | replication, |
| | | | | | | | recombination |
| | | | | | | | and |
| | | | | | | | repair; Holliday |
| | | | | | | | junction |
| | | | | | | | resolvase - |
| | | | | | | | archaeal type |
| | | | | | | | 6e−10 |
| 828, | NEQ423 | Probable thiamine | Thiamine biosynthesis | 2.00E−47 | Thil Thiamine biosynthesis | | Metabolism; Coenzyme |
| 829 | | biosynthesisprotein | ATP pyrophosphatase | | protein (Thil) 5.40e−19 | | metabolism; Thiamine |
| | | thil [Archaeoglobus | [Thermoanaerobacter | | :THUMP THUMP domain | | biosynthesis |
| | | fulgidus] | tengcongensis]. | | 7.10e−18 :TIGR00342 | | ATP |
| | | | | | TIGR00342 thiamine | | pyrophosphatase |
| | | | | | biosynthesis protein Thil | | 8e−43 |
| | | | | | 2.20e−39 | | |
| 830, | NEQ425 | type IV secretion | type IV secretion | 7.00E−76 | GSPII_E Type II/IV secretion | | Cellular |
| 831 | | system | system protein | | system protein 2.40e−3 | | processes; Cell |
| | | protein[Methanosarcina | [Methanosarcina | | | | motility and |
| | | acetivorans str. | acetivorans str. C2A]. | | | | secretion; Type |
| | | C2A] | | | | | IV secretory |
| | | | | | | | pathway, |
| | | | | | | | VirB11 |
| | | | | | | | components, |
| | | | | | | | and related |
| | | | | | | | ATPases |
| | | | | | | | involved in |
| | | | | | | | archaeal |
| | | | | | | | flagella |
| | | | | | | | biosynthesis |
| | | | | | | | 1e−34 |
| 832, | NEQ426 | recombinase, radA | recombinase, radA | 9.00E−97 | HHH Helix-hairpin- | 3.6.1.— | Information |
| 833 | | [Pyrococcusfuriosus | [Pyrococcus furiosus | | helix motif 7.40e−05 | | storage and |
| | | DSM 3638] | DSM 3638]. | | | | processing; DNA |
| | | | | | | | replication, |
| | | | | | | | recombination |
| | | | | | | | and |
| | | | | | | | repair; RecA/RadA |
| | | | | | | | recombinase |
| | | | | | | | 5e−97 |
| 834, | NEQ427 | DNA-directed RNA | DNA-directed RNA | 9.00E−81 | 1.10E−23 | 2.7.7.6 | Information |
| 835 | | polymerase, subunit | polymerase, subunit A | | | | storage and |
| | | A″ (rpoA2) | [Pyrococcus abyssi]. | | | | processing; Transcription; |
| | | [Pyrococcus | | | | | DNA- |
| | | | | | | | directed |
| | | | | | | | RNA |
| | | | | | | | polymerase |
| | | | | | | | beta' |
| | | | | | | | subunit/160 kD |
| | | | | | | | subunit |
| | | | | | | | (split gene in |
| | | | | | | | archaea and |
| | | | | | | | Syn) 6e−82 |
| 836, | NEQ428 | Predicted RNA- | conserved | 8.00E−10 | UPF0044 Uncharacterised | | Information |
| 837 | | binding | hypothetical protein | | protein family UPF0044 | | storage and |
| | | proteincontaining KH | [Methanococcus | | 1.20e−13 :TIGR00253 | | processing; Translation, |
| | | domain, possibly | jannaschii]. | | TIGR00253 conserved | | ribosomal |
| | | | | | hypothetical protein | | structure and |
| | | | | | TIGR00253 4.20e−05 | | biogenesis; Predicted |
| | | | | | | | RNA- |
| | | | | | | | binding |
| | | | | | | | protein |
| | | | | | | | containing KH |
| | | | | | | | domain, |
| | | | | | | | possibly |
| | | | | | | | ribosomal |
| | | | | | | | protein 4e−11 |
| 838, | NEQ429 | hypothetical protein | hypothetical protein | 6.00E−03 | 0 | | |
| 839 | | | [Plasmodium | | | | |
| | | | falciparum 3D7]. | | | | |
| 840, | NEQ430 | activator 1 | activator 1 (replication | 8.00E−73 | AAA ATPase family | 2.7.7.7 | Information |
| 841 | | (replication factor C), | factor C), 53 KD | | associated with | | storage and |
| | | 53 KD subunit [Mc | subunit | | various cellular | | processing; DNA |
| | | jannaschii] | [Methanococcus | | activities (AAA) | | replication, |
| | | | jannaschii]. | | 2.60e−11 :Rad17 | | recombination |
| | | | | | Rad17 cell cycle | | and |
| | | | | | checkpoint protein | | repair; ATPase |
| | | | | | 3.50e−3 | | involved in |
| | | | | | | | DNA |
| | | | | | | | replication 5e−74 |
| 842, | NEQ431 | conserved | hypothetical protein | 5.00E−31 | DUF99 Protein of unknown | | Poorly |
| 843 | | hypothetical | [Methanosarcina | | function DUF99 1.80e−49 | | characterized; |
| | | protein[Pyrococcus | barkeri]. | | | | Function |
| | | furiosus DSM 3638] | | | | | unknown; Uncharacterized |
| | | | | | | | ACR 3e−27 |
| 844, | NEQ433 | LSU ribosomal | ribosomal protein L3 | 5.00E−71 | Ribosomal_L3 Ribosomal | | Information |
| 845 | | protein L3 (E. coli | (E. coli L3) | | protein L3 1.30e−63 | | storage and |
| | | L3)[Mtb | [Methanothermobacter | | | | processing; Translation, |
| | | thermautotrophicus] | thermautotrophicus]. | | | | ribosomal |
| | | | | | | | structure and |
| | | | | | | | biogenesis; Ribosomal |
| | | | | | | | protein L3 3e−72 |
| 846, | NEQ432 | Type I signal | Type I signal | 3.00E−08 | 0 | | Cellular |
| 847 | | peptidase[Methanopyrus | peptidase | | | | processes; Cell |
| | | kandleri AV19] | [Methanopyrus | | | | motility and |
| | | | kandleri AV19]. | | | | secretion; Signal |
| | | | | | | | peptidase |
| | | | | | | | I 6e−07 |
| 848, | NEQ434 | reverse gyrase | reverse gyrase | 1.00E−132 | DEAD DEAD/DEAH | 5.99. | Information |
| 849 | | [Pyrococcus | [Pyrococcus | | box helicase 2.60e−06 | 1.3 | storage and |
| | | | horikoshii]. | | :rgy rgy reverse | | processing; DNA |
| | | | | | gyrase 1.20e−08 | | replication, |
| | | | | | | | recombination |
| | | | | | | | and |
| | | | | | | | repair; Reverse |
| | | | | | | | gyrase 1e−134 |
| 850, | NEQ435 | hypothetical protein | hypothetical protein | 7.00E−25 | DUF460 Protein of unknown | | Poorly |
| 851 | | [Archaeoglobusfulgidus] | [Archaeoglobusfulgidus]. | | function (DUF460) 6.10e−18 | | characterized; |
| | | | | | | | Function |
| | | | | | | | unknown; Uncharacterized |
| | | | | | | | ACR 5e−26 |
| 852, | NEQ436 | protein translocase, | protein translocase, | 2.00E−46 | SecD_SecF Protein export | | Cellular |
| 853 | | subunit SECD(secD) | subunit SECD (secD) | | membrane protein 9.00e−4 | | processes; Cell |
| | | [Methanococcus | [Methanococcus | | :2A0604s01 2A0604s01 | | motility and |
| | | jannaschii] | jannaschii]. | | protein-export membrane | | secretion; Preprotein |
| | | | | | protein (SecDF) Family | | translocase |
| | | | | | 2.20e−08 :3a0501s07 | | subunit SecD |
| | | | | | 3a0501s07 protein-export | | 2e−47 |
| | | | | | membrane protein SecF | | |
| | | | | | 1.50e−05 :secD secD | | |
| | | | | | protein-export membrane | | |
| | | | | | protein SecD 2.60e−10 | | |
| 854, | NEQ437 | protein translocase, | protein translocase, | 4.00E−30 | SecD_SecF Protein export | | Cellular |
| 855 | | subunit SECF(secF) | subunit SECF (secF) | | membrane protein 1.10e−09 | | processes; Cell |
| | | [Methanococcus | [Methanococcus | | :2A0604s01 2A0604s01 | | motility and |
| | | jannaschii] | jannaschii]. | | protein-export membrane | | secretion; Preprotein |
| | | | | | protein (SecDF) Family | | translocase |
| | | | | | 2.00e−06 :3a0501s07 | | subunit SecF |
| | | | | | 3a0501s07 protein-export | | 3e−31 |
| | | | | | membrane protein SecF | | |
| | | | | | 2.20e−3 | | |
| 856, | NEQ438 | predicted RNA- | hypothetical protein | 3.00E−30 | 0 | | Information |
| 857 | | binding protein | [Pyrococcus abyssi]. | | | | storage and |
| | | homologous to | | | | | processing; Transcription; |
| | | eukaryotic snRNP | | | | | Predicted |
| | | [Methanopyrus | | | | | RNA- |
| | | kandleri AV19] | | | | | binding |
| | | SPLIT see SEQ ID | | | | | protein |
| | | NOS: 982, 983 | | | | | homologous |
| | | | | | | | to eukaryotic |
| | | | | | | | snRNP 2e−31 |
| 858, | NEQ440 | Predicted DNA- | methyltransferase | 4.00E−30 | UPF0020 Putative | 2.1.1.— | Information |
| 859 | | modificationmethylase | related protein | | RNA methylase | | storage and |
| | | [Methanopyrus | [Methanothermobacter | | family UPF0020 | | processing; DNA |
| | | kandleri] | thermautotrophicus]. | | 2.00e−30 | | replication, |
| | | | | | :TIGR01177 | | recombination |
| | | | | | TIGR01177 | | and |
| | | | | | conserved | | repair; Predicted |
| | | | | | hypothetical protein | | DNA |
| | | | | | TIGR01177 1.20e−30 | | modification |
| | | | | | | | methylase 3e−31 |
| 860, | NEQ442 | hypothetical protein | hypothetical protein | 0.02 | 0 | | |
| 861 | | | [Plasmodium | | | | |
| | | | falciparum 3D7]. | | | | |
| 862, | NEQ441 | Uncharacterized | hypothetical protein | 8.00E−53 | DUF51 Protein of unknown | | Poorly |
| 863 | | conserved | [Aquifex aeolicus]. | | function DUF51 4.60e−85 | | characterized; |
| | | protein[Methanopyrus | | | :TIGR00296 TIGR00296 | | Function |
| | | kandleri AV19] | | | conserved hypothetical | | unknown; Uncharacterized |
| | | | | | protein TIGR00296 3.50e−52 | | ACR 6e−54 |
| 864, | NEQ443 | hypothetical protein | hypothetical protein | 6.00E−03 | 0 | | |
| 865 | | | [Plasmodium | | | | |
| | | | falciparum 3D7]. | | | | |
| 866, | NEQ444 | hypothetical protein | haemagglutinin | 0.02 | 0 | | |
| 867 | | | [Mycoplasma | | | | |
| | | | gallisepticum]. | | | | |
| 868, | NEQ445 | hypothetical protein | possible HNRNP | 0.21 | 0 | | |
| 869 | | | arginine n- | | | | |
| | | | methyltransferase | | | | |
| | | | [Plasmodium yoelii | | | | |
| | | | yoelii]. | | | | |
| 870, | NEQ446 | SSU Ribosomal | SSU ribosomal | 5.00E−27 | Ribosomal_S9 Ribosomal | | Information |
| 871 | | protein | protein S9P; (rps9P) | | protein S9/S16 1.30e−29 | | storage and |
| | | S9[Methanopyrus | [Pyrococcus furiosus | | | | processing; Translation, |
| | | kandleri AV19] | DSM 3638]. | | | | ribosomal |
| | | | | | | | structure and |
| | | | | | | | biogenesis; Ribosomal |
| | | | | | | | protein S9 7e−28 |
| 872, | NEQ448 | hypothetical protein | OUTER CAPSID | 0.21 | 0 | | |
| 873 | | | PROTEIN VP4 | | | | |
| | | | (HEMAGGLUTININ) | | | | |
| | | | (OUTER LAYER | | | | |
| | | | PROTEIN VP4) | | | | |
| | | | [CONTAINS: OUTER | | | | |
| | | | CAPSID PROTEINS | | | | |
| | | | VP5 AND VP8]. | | | | |
| 874, | NEQ447 | hypothetical protein | M. jannaschii | 9.00E−03 | 0 | | |
| 875 | | | predicted coding | | | | |
| | | | region MJ0027 | | | | |
| | | | [Methanococcus | | | | |
| | | | jannaschii]. | | | | |
| 876, | NEQ449 | hypothetical protein | hypothetical protein | 5.00E−08 | 0 | | Cellular |
| 877 | | [Sulfolobustokodaii] | [Plasmodium | | | | processes; Cell |
| | | | falciparum 3D7]. | | | | division and |
| | | | | | | | chromosome |
| | | | | | | | partitioning; Chromosome |
| | | | | | | | segregation |
| | | | | | | | ATPases 2e−07 |
| 878, | NEQ450 | ubiquinol- | ubiquinol-cytochrome | 7.00E−25 | Ribosomal_L10e Ribosomal | | Information |
| 879 | | cytochrome C | C reductase complex, | | L10 7.20e−31 :L10e L10e | | storage and |
| | | reductasecomplex, | subunit VI requiring | | ribosomal protein L10.e | | processing; Translation, |
| | | subunit VI requiring | protein | | 2.30e−32 | | ribosomal |
| | | protein | [Archaeoglobus | | | | structure and |
| | | | fulgidus]. | | | | biogenesis; Ribosomal |
| | | | | | | | protein |
| | | | | | | | L16/L10E 6e−26 |
| 880, | NEQ451 | Predicted Zn- | hypothetical protein | 1.00E−21 | | | Poorly |
| 881 | | dependent | [Aquifex aeolicus]. | | | | characterized; |
| | | protease[Methanopyrus | | | | | General |
| | | kandleri AV19] | | | | | function |
| | | | | | | | prediction |
| | | | | | | | only; Predicted |
| | | | | | | | Zn- |
| | | | | | | | dependent |
| | | | | | | | proteases 1e−22 |
| 882, | NEQ452 | DNA-directed RNA | DNA-directed RNA | 3.00E−19 | RNA_pol_A_bac | 2.7.7.6 | Information |
| 883 | | polymerase, subunit | polymerase, subunit D | | Bacterial RNA | | storage and |
| | | D (rpoD) | [Pyrococcus abyssi]. | | polymerase, alpha | | processing; Transcription; |
| | | [Pyrococcus abyssi] | | | chain, N terminal | | DNA- |
| | | | | | domain 1.50e−05 | | directed |
| | | | | | | | RNA |
| | | | | | | | polymerase |
| | | | | | | | alpha |
| | | | | | | | subunit/40 kD |
| | | | | | | | subunit 2e−20 |
| 884, | NEQ453 | Predicted | Predicted | 7.00E−10 | V4R V4R domain 1.50e−05 | | Poorly |
| 885 | | transcriptional | transcriptional | | | | characterized; |
| | | regulatorconsisting | regulator consisting of | | | | General |
| | | of a V4R domain and a | a V4R domain and a | | | | function |
| | | | DNA-binding HTH | | | | prediction |
| | | | domain | | | | only; Predicted |
| | | | [Methanopyrus | | | | hydrocarbon |
| | | | kandleri AV19]. | | | | binding |
| | | | | | | | protein |
| | | | | | | | (contains V4R |
| | | | | | | | domain) 3e−08 |
| 886, | NEQ454 | centromere binding | centromere binding | 1.00E−112 | PUA PUA domain | 4.2.1.70 | Information |
| 887 | | proteinhomolog/pseudouridine | protein | | 1.20e−25 :TruB_N | | storage and |
| | | synthase | homolog/pseudouridine | | TruB family | | processing; Translation, |
| | | of | synthase | | pseudouridylate | | ribosomal |
| | | | [Pyrococcus furiosus | | synthase (N terminal | | structure and |
| | | | DSM 3638]. | | domain) 2.40e−57 | | biogenesis; Pseudouridine |
| | | | | | :CBF5 CBF5 rRNA | | synthase 1e−112 |
| | | | | | pseudouridine | | |
| | | | | | synthase, putative | | |
| | | | | | 2.40e−170 :TruB | | |
| | | | | | TruB tRNA | | |
| | | | | | pseudouridine | | |
| | | | | | synthase B 8.60e−26 | | |
| | | | | | :unchar_dom_2 | | |
| | | | | | unchar_dom_2 | | |
| | | | | | uncharacterized | | |
| | | | | | domain 2 4.80e−4 | | |
| 888, | NEQ455 | Predicted membrane | hypothetical protein | 1.00E−18 | DUF112 Integral membrane | | Poorly |
| 889 | | protein[Methanopyrus | [Pyrococcus abyssi]. | | protein DUF112 9.90e−4 | | characterized; |
| | | kandleri AV19] | | | | | Function |
| | | | | | | | unknown; Predicted |
| | | | | | | | membrane |
| | | | | | | | protein 9e−20 |
| 890, | NEQ457 | methionyl-tRNA | methionyl-tRNA | 1.00E−155 | tRNA-synt_1 tRNA | 6.1.1. | Information |
| 891 | | synthetase (class | synthetase | | synthetases class I | 10 | storage and |
| | | 1a)[Pyrococcus | [Pyrococcus | | (I, L, M and V) | | processing; Translation, |
| | | horikoshii] | horikoshii]. | | 2.20e−09 | | ribosomal |
| | | | | | :tRNA_bind Putative | | structure and |
| | | | | | tRNA binding | | biogenesis; Methionyl- |
| | | | | | domain 2.60e−40 | | tRNA |
| | | | | | :metG metG | | synthetase |
| | | | | | methionyl-tRNA | | 1e−115 |
| | | | | | synthetase 2.00e−152 | | |
| | | | | | :metG_C_term | | |
| | | | | | metG_C_term | | |
| | | | | | methionyl-tRNA | | |
| | | | | | synthetase C- | | |
| | | | | | terminal region, beta | | |
| | | | | | subunit 2.20e−28 | | |
| | | | | | :pheT_bact | | |
| | | | | | pheT_bact | | |
| | | | | | phenylalanyl-tRNA | | |
| | | | | | synthetase, beta | | |
| | | | | | subunit 2.30e−4 | | |
| 892, | NEQ456 | Mg-dependent | hypothetical protein | 6.00E−38 | TatD_DNase TatD | 3.1.21.— | Information |
| 893 | | DNase | [Acidianus | | related DNase | | storage and |
| | | [Methanopyruskandleri | ambivalens]. | | 2.80e−69 | | processing; DNA |
| | | AV19] | | | :TIGR00010 | | replication, |
| | | | | | TIGR00010 | | recombination |
| | | | | | deoxyribonuclease, | | and |
| | | | | | TatD family 6.60e−53 | | repair; Mg- |
| | | | | | | | dependent |
| | | | | | | | DNase 3e−28 |
| 894, | NEQ458 | hypothetical protein | hypothetical protein | 1.00E−03 | 0 | | |
| 895 | | | [Plasmodium | | | | |
| | | | falciparum 3D7]. | | | | |
| 896, | NEQ459 | glutaredoxin-like | glutaredoxin-like | 7.00E−23 | | 1.6.4.5 | Cellular |
| 897 | | protein | protein [Pyrococcus | | | | processes; Posttranslational |
| | | [Pyrococcusfuriosus | furiosus DSM 3638]. | | | | modification, |
| | | DSM 3638] | | | | | protein |
| | | | | | | | turnover, |
| | | | | | | | chaperones; Thiol- |
| | | | | | | | disulfide |
| | | | | | | | isomerase |
| | | | | | | | and |
| | | | | | | | thioredoxins |
| | | | | | | | 1e−23 |
| 898, | NEQ460 | Predicted | Predicted | 2.00E−39 | RIO1 RIO1/ZK632.3/MJ0444 | | Cellular |
| 899 | | serine/threonine | serine/threonine | | family 2.10e−57 | | processes; Signal |
| | | proteinkinase | protein kinase | | | | transduction |
| | | [Methanopyrus | [Methanopyrus | | | | mechanisms; |
| | | kandleri AV19] | kandleri AV19]. | | | | Predicted |
| | | | | | | | serine/threonine |
| | | | | | | | protein |
| | | | | | | | kinases 2e−38 |
| 900, | NEQ461 | inorganic pyrophosphatase[Sulfolobus tokodaii] | | | Pyrophosphatase Inorganic | 3.6.1.1 | Metabolism; Energy |
| 901 | | | | | pyrophosphatase 2.20e−63 | | production |
| | | | | | | | and |
| | | | | | | | conversion; Inorganic |
| | | | | | | | pyrophosphatase |
| | | | | | | | 7e−48 |
| 902, | NEQ462 | hypothetical protein | hypothetical protein | 6.00E−04 | 0 | | |
| 903 | | | [Plasmodium | | | | |
| | | | falciparum 3D7]. | | | | |
| 904, | NEQ464 | RIO1-like | RIO1-like | 3.00E−44 | RIO1 RIO1/ZK632.3/MJ0444 | | Cellular |
| 905 | | serine/threonine | serine/threonine | | family 1.10e−22 | | processes; Signal |
| | | proteinkinase fused | protein kinase fused | | | | transduction |
| | | to an N-terminal | to an N-terminal DNA- | | | | mechanisms; |
| | | DNA-binding | binding HTH domain | | | | RIO-like |
| | | | [Methanopyrus | | | | serine/threonine |
| | | | kandleri AV19]. | | | | protein |
| | | | | | | | kinase fused |
| | | | | | | | to N-terminal |
| | | | | | | | HTH domain |
| | | | | | | | 3e−27 |
| 906, | NEQ463 | Predicted GTPase, | GTP binding protein | 1.00E−104 | TGS TGS domain 7.60e−11 | | Poorly |
| 907 | | probabletranslation | [Sulfolobus | | :TIGR00092 TIGR00092 | | characterized; |
| | | factor [Methanopyrus | solfataricus]. | | conserved hypothetical | | General |
| | | | | | protein TIGR00092 1.70e−10 | | function |
| | | | | | | | prediction |
| | | | | | | | only; Predicted |
| | | | | | | | GTPase 4e−95 |
| 908, | NEQ466 | Predicted hydrolase | conserved | 3.00E−98 | lactamase_B | 3.—.—.— | Poorly |
| 909 | | of the metallo-beta- | hypothetical protein | | Metallo-beta- | | characterized; |
| | | lactamase | [Methanococcus | | lactamase | | General |
| | | superfamily | jannaschii]. | | superfamily 1.10e−19 | | function |
| | | | | | :MG423 MG423 | | prediction |
| | | | | | conserved | | only; Predicted |
| | | | | | hypothetical protein | | hydrolase of |
| | | | | | 2.10e−61 | | the metallo- |
| | | | | | | | beta- |
| | | | | | | | lactamase |
| | | | | | | | superfamily |
| | | | | | | | 2e−99 |
| 910, | NEQ467 | SSU Ribosomal | Ribosomal protein | 7.00E−37 | Ribosomal_S13 Ribosomal | | Information |
| 911 | | protein | S13 [Methanopyrus | | protein S13/S18 4.30e−41 | | storage and |
| | | S13[Methanopyrus | kandleri AV19]. | | :FOLD1946 No CATH | | processing; Translation, |
| | | kandleri AV19] | | | Annotation 1.00e−4 | | ribosomal |
| | | | | | | | structure and |
| | | | | | | | biogenesis; Ribosomal |
| | | | | | | | protein S13 |
| | | | | | | | 9e−34 |
| 912, | NEQ468 | hypothetical protein | hypothetical protein | 8.00E−05 | 0 | | |
| 913 | | | [Plasmodium yoelii | | | | |
| | | | yoelii]. | | | | |
| 914, | NEQ469 | SSU ribosomal | SSU ribosomal | 8.00E−35 | Ribosomal_S8e Ribosomal | | Information |
| 915 | | protein S8E | protein S8E (rps8E) | | protein S8e 1.70e−43 :S8e | | storage and |
| | | (rps8E)[Archaeoglobus | [Archaeoglobus | | S8e ribosomal protein S8.e | | processing; Translation, |
| | | fulgidus] | fulgidus]. | | 8.30e−39 | | ribosomal |
| | | | | | | | structure and |
| | | | | | | | biogenesis; Ribosomal |
| | | | | | | | protein S8E |
| | | | | | | | 5e−36 |
| 916, | NEQ470 | hypothetical protein | Uncharacterized | 3.00E−06 | 0 | | Poorly |
| 917 | | | conserved protein | | | | characterized; |
| | | | [Thermoplasma | | | | Function |
| | | | volcanium]. | | | | unknown; Uncharacterized |
| | | | | | | | ArCR 4e−07 |
| 918, | NEQ471 | hypothetical protein | TraD-like protein | 5.00E−03 | 0 | | |
| 919 | | | [Haemophilus | | | | |
| | | | influenzae biotype | | | | |
| | | | aegyptius]. | | | | |
| 920, | NEQ472 | Calcineurin | conserved protein | 3.00E−12 | Metallophos Calcineurin-like | | Poorly |
| 921 | | superfamilyphosphoesterase | [Methanothermobacter | | phosphoesterase 6.30e−18 | | characterized; |
| | | [Methanopyrus | thermautotrophicus]. | | :TIGR00040 TIGR00040 | | General |
| | | | | | conserved hypothetical | | function |
| | | | | | protein TIGR00040 6.60e−05 | | prediction |
| | | | | | | | only; Predicted |
| | | | | | | | phosphoesterases, |
| | | | | | | | related |
| | | | | | | | to the lcc |
| | | | | | | | protein 2e−13 |
| 922, | NEQ473 | cell division protein | cell division protein | 9.00E−77 | tubulin Tubulin/FtsZ | 3.4.24.— | Cellular |
| 923 | | (ftsZ- | (ftsZ-1) | | family, GTPase | | processes; Cell |
| | | 1)[Archaeoglobus | [Archaeoglobus | | domain 5.80e−57 | | division and |
| | | fulgidus] | fulgidus]. | | :ftsZ ftsZ cell | | chromosome |
| | | | | | division protein FtsZ | | partitioning; Cell |
| | | | | | 1.70e−103 | | division |
| | | | | | :tubulin_C | | GTPase 6e−78 |
| | | | | | Tubulin/FtsZ family, | | |
| | | | | | C-terminal domain | | |
| | | | | | 1.20e−15 | | |
| 924, | NEQ475 | cell division control | cell division control | 0 | AAA ATPase family | 2.7.1.— | Cellular |
| 925 | | protein 48, | protein 48, aaa family; | | associated with | | processes; Posttranslational |
| | | aaafamily; (cdc48-2) | (cdc48-2) [Pyrococcus | | various cellular | | modification, |
| | | [P. furiosus] | furiosus DSM 3638]. | | activities (AAA) | | protein |
| | | | | | 1.70e−94 :AAA | | turnover, |
| | | | | | ATPase family | | chaperones; ATPases |
| | | | | | associated with | | of the |
| | | | | | various cellular | | AAA+ class 0 |
| | | | | | activities (AAA) | | |
| | | | | | 8.30e−92 :cdc48_2 | | |
| | | | | | Cell division protein | | |
| | | | | | 48 (CDC48), domain | | |
| | | | | | 2 2.40e−15 | | |
| | | | | | :cdc48_N Cell | | |
| | | | | | division protein 48 | | |
| | | | | | (CDC48), N-terminal | | |
| | | | | | domain 1.20e−32 | | |
| | | | | | :Sigma54_activat | | |
| | | | | | Sigma-54 interaction | | |
| | | | | | domain 3.20e−3 | | |
| | | | | | :FtsH_fam | | |
| | | | | | FtsH_fam ATP- | | |
| | | | | | dependent | | |
| | | | | | metalloprotease | | |
| | | | | | FtsH 1.70e−22 | | |
| | | | | | :26Sp45 26Sp45 | | |
| | | | | | 26S proteasome | | |
| | | | | | subunit P45 family | | |
| | | | | | 1.10e−79 :CDC48 | | |
| | | | | | CDC48 AAA family | | |
| | | | | | ATPase, CDC48 | | |
| | | | | | subfamily 0.0 | | |
| 926, | NEQ474 | hypothetical protein | hypothetical protein | 0.21 | 0 | | |
| 927 | | | [Clostridium | | | | |
| | | | thermocellum ATCC | | | | |
| | | | 27405]. | | | | |
| 928, | NEQ476 | hypothetical protein | M. jannaschii | 0.04 | 0 | | |
| 929 | | | predicted coding | | | | |
| | | | region MJ1254 | | | | |
| | | | [Methanococcus | | | | |
| | | | jannaschii]. | | | | |
| 930, | NEQ477 | hypothetical protein | cytochrome c oxidase | 0.49 | 0 | | |
| 931 | | | subunit III (aa3 type) | | | | |
| | | | [Oceanobacillus | | | | |
| | | | iheyensis]. | | | | |
| 932, | NEQ478 | SSU ribosomal | ribosomal protein S4 | 3.00E−47 | KOW KOW motif 4.50e−06 | | Information |
| 933 | | protein | [Methanothermobacter | | :Ribosomal_S4e Ribosomal | | storage and |
| | | S4E[Methanothermobacter | thermautotrophicus]. | | family S4e 2.70e−18 :S4 S4 | | processing; Translation, |
| | | | | | domain 2.10e−07 | | ribosomal |
| | | | | | | | structure and |
| | | | | | | | biogenesis; Ribosomal |
| | | | | | | | protein S4E |
| | | | | | | | 2e−48 |
| 934, | NEQ479 | phenylalanyl-tRNA | phenylalanyl-tRNA | 4.00E−78 | pheT_arch | 6.1.1. | Information |
| 935 | | synthetase beta- | synthetase beta-chain | | pheT_arch | 20 | storage and |
| | | chain[Pyrococcus | [Pyrococcus furiosus | | phenylalanyl-tRNA | | processing; Translation, |
| | | furiosus] | DSM 3638]. | | synthetase, beta | | ribosomal |
| | | | | | subunit 3.10e−89 | | structure and |
| | | | | | :pheT_bact | | biogenesis; Phenylalanyl- |
| | | | | | pheT_bact | | tRNA |
| | | | | | phenylalanyl-tRNA | | synthetase |
| | | | | | synthetase, beta | | beta subunit |
| | | | | | subunit 2.20e−09 | | 4e−78 |
| | | | | | :B3_4 B3/4 domain | | |
| | | | | | 8.10e−06 :B5 tRNA | | |
| | | | | | synthetase B5 | | |
| | | | | | domain 3.90e−4 | | |
| 936, | NEQ480 | SSU ribosomal | SSU ribosomal | 2.00E−45 | Ribosomal_S19 Ribosomal | | Information |
| 937 | | protein | protein S19P | | protein S19 4.10e−30 | | storage and |
| | | S19P[Pyrococcus | [Pyrococcus abyssi]. | | :rpsS_arch rpsS_arch | | processing; Translation, |
| | | abyssi] | | | ribosomal protein S19 1.70e−67 | | ribosomal |
| | | | | | :rpsS_bact rpsS_bact | | structure and |
| | | | | | ribosomal protein S19 5.50e−19 | | biogenesis; Ribosomal |
| | | | | | | | protein S19 |
| | | | | | | | 3e−46 |
| 938, | NEQ481 | SSU ribosomal | SSU ribosomal | 3.00E−31 | Ribosomal_S3_C Ribosomal | | Information |
| 939 | | protein S3P | protein S3P (rpsC) | | protein S3, C-terminal | | storage and |
| | | (rpsC)[Methanococcus | [Methanococcus | | domain 3.70e−4 :rpsC_E_A | | processing; Translation, |
| | | jannaschii] | jannaschii]. | | rpsC_E_A ribosomal protein | | ribosomal |
| | | | | | S3 1.20e−36 :rpsC_bact | | structure and |
| | | | | | rpsC_bact ribosomal protein | | biogenesis; Ribosomal |
| | | | | | S3 3.00e−05 | | protein S3 2e−32 |
| 940, | NEQ482 | transcription initiation | conserved protein | 2.00E−08 | TFIIE_alpha TFIIE alpha | | Information |
| 941 | | factor IIE, subunit | [Methanothermobacter | | subunit 4.40e−05 | | storage and |
| | | alpha (TFE) [Mc. | thermautotrophicus]. | | :TIGR00373 TIGR00373 | | processing; Transcription; |
| | | jannaschii] | | | conserved hypothetical | | Transcription |
| | | | | | protein TIGR00373 2.40e−05 | | initiation |
| | | | | | | | factor IIE, |
| | | | | | | | large subunit |
| | | | | | | | 2e−09 |
| 942, | NEQ483 | hypothetical protein | hypothetical protein | 0.01 | 0 | | |
| 943 | | | [Cytophaga | | | | |
| | | | hutchinsonii]. | | | | |
| 944, | NEQ485 | hypothetical protein | hypothetical protein | 3.00E−06 | 0 | | |
| 945 | | | [Plasmodium | | | | |
| | | | falciparum 3D7]. | | | | |
| 946, | NEQ484 | hypothetical protein | hypothetical protein | 0.01 | 0 | | |
| 947 | | | [Cytophaga | | | | |
| | | | hutchinsonii]. | | | | |
| 948, | NEQ486 | Na+/Ca+ exchanging | hypothetical | 2.00E−41 | Na_Ca_Ex Sodium/calcium | | Cellular |
| 949 | | protein | conserved protein | | exchanger protein 2.50e−28 | | processes; Inorganic |
| | | related[Pyrococcus | [Oceanobacillus | | :Na_Ca_Ex Sodium/calcium | | ion |
| | | abyssi] | iheyensis]. | | exchanger protein 4.50e−26 | | transport and |
| | | | | | :TIGR00367 TIGR00367 | | metabolism; Ca2+/ |
| | | | | | K+-dependent Na+/Ca+ | | Na+ |
| | | | | | exchanger related-protein | | antiporter 8e−42 |
| | | | | | 2.10e−20 | | |
| 950, | NEQ487 | SSU Ribosomal | Ribosomal protein | 2.00E−43 | Ribosomal_S15 Ribosomal | | Information |
| 951 | | protein | S15P/S13E | | protein S15 4.00e−14 | | storage and |
| | | S15P/S13E[Methanopyrus | [Methanopyrus | | | | processing; Translation, |
| | | kandleri AV19] | kandleri AV19]. | | | | ribosomal |
| | | | | | | | structure and |
| | | | | | | | biogenesis; Ribosomal |
| | | | | | | | protein |
| | | | | | | | S15P/S13E |
| | | | | | | | 3e−44 |
| 952, | NEQ489 | LSU ribosomal | LSU ribosomal protein | 2.00E−20 | L15 Ribosomal protein L15 | | Information |
| 953 | | protein L18E | L18E (rpl18E) | | 1.20e−06 | | storage and |
| | | (rpl18E)[Sulfolobus | [Sulfolobus | | | | processing; Translation, |
| | | solfataricus] | solfataricus]. | | | | ribosomal |
| | | | | | | | structure and |
| | | | | | | | biogenesis; Ribosomal |
| | | | | | | | protein L18E |
| | | | | | | | 1e−19 |
| 954, | NEQ490 | hypothetical protein | Ubie_methyltran, | 2.00E−07 | 0 | | |
| 955 | | | ubiE/COQ5 | | | | |
| | | | methyltransferase | | | | |
| | | | family [Bacillus | | | | |
| | | | anthracis A2012]. | | | | |
| 956, | NEQ491 | NADH | 324aa long | 2.00E−70 | pyr_redox Pyridine | 1.6.4.5 | Cellular |
| 957 | | oxidase/thioredoxin | hypothetical | | nucleotide- | | processes; Posttranslational |
| | | reductase[Sulfolobus | thioredoxin reductase | | disulphide | | modification, |
| | | solfataricus] | [Sulfolobus tokodaii]. | | oxidoreductase | | protein |
| | | | | | 2.80e−72 :gidA gidA | | turnover, |
| | | | | | glucose-inhibited | | chaperones; Thioredoxin |
| | | | | | division protein A | | reductase 3e−69 |
| | | | | | 8.10e−07 | | |
| | | | | | :TRX_reduct | | |
| | | | | | TRX_reduct | | |
| | | | | | thioredoxin | | |
| | | | | | reductase 9.00e−128 | | |
| | | | | | :gltA gltA glutamate | | |
| | | | | | synthase (NADPH), | | |
| | | | | | homotetrameric | | |
| | | | | | 1.10e−3 | | |
| | | | | | :GOGAT_sm_gam | | |
| | | | | | GOGAT_sm_gam | | |
| | | | | | glutamate | | |
| | | | | | synthases, | | |
| | | | | | NADH/NADPH, | | |
| | | | | | small subunit 6.10e−3 | | |
| 958, | NEQ492 | hypothetical protein | ADHESIN AIDA-I | 2.00E−03 | 0 | | |
| 959 | | | PRECURSOR. | | | | |
| 960, | NEQ493 | O-sialoglycoprotein | O-sialoglycoprotein | 1.00E−75 | Peptidase_M22 | 3.4.24. | Cellular |
| 961 | | endopeptidase | endopeptidase | | Glycoprotease | 57 | processes; Posttranslational |
| | | [Pyrococcus | [Pyrococcus | | family 5.90e−61 :gcp | | modification, |
| | | horikoshii]. | horikoshii]. | | gcp | | protein |
| | | | | | metalloendopeptidase, | | turnover, |
| | | | | | putative, | | chaperones; |
| | | | | | glycoprotease family | | Metal- |
| | | | | | 1.20e−81 | | dependent |
| | | | | | | | proteases |
| | | | | | | | with possible |
| | | | | | | | chaperone |
| | | | | | | | activity 1e−76 |
| 962, | NEQ494 | pyruvate formate- | 351aa long conserved | 1.00E−104 | Radical_SAM | 1.97. | Cellular |
| 963 | | lyase | hypothetical protein | | Radical SAM | 1.4 | processes; Posttranslational |
| | | activatingenzyme | [Sulfolobus tokodaii]. | | superfamily 5.00e−25 | | modification, |
| | | homolog [Pb | | | | | protein |
| | | aerophilum] | | | | | turnover, |
| | | | | | | | chaperones; Pyruvate- |
| | | | | | | | formate |
| | | | | | | | lyase- |
| | | | | | | | activating |
| | | | | | | | enzyme 8e−96 |
| 964, | NEQ495 | Predicted P-loop | hypothetical protein | 1.00E−92 | 1.10E−62 | | Poorly |
| 965 | | ATPase fused to | [Pyrococcus | | | | characterized; |
| | | anacetyltransferase | horikoshii]. | | | | General |
| | | [M. kandleri] SPLIT | | | | | function |
| | | see SEQ ID | | | | | prediction |
| | | NOS: 194, 195 | | | | | only; Predicted |
| | | | | | | | P-loop |
| | | | | | | | ATPase fused |
| | | | | | | | to an |
| | | | | | | | acetyltransferase |
| | | | | | | | 9e−94 |
| 966, | NEQ498 | Translation initiation | Translation initiation | 1.00E−166 | GTP_EFTU | 3.6.1. | Information |
| 967 | | factor 2, | factor 2, GTPase | | Elongation factor Tu | 48 | storage and |
| | | GTPase[Methanopyrus | [Methanopyrus | | GTP binding domain | | processing; Translation, |
| | | kandleri AV19] | kandleri AV19]. | | 1.70e−40 :mobB | | ribosomal |
| | | | | | mobB | | structure and |
| | | | | | molybdopterin- | | biogenesis; Translation |
| | | | | | guanine dinucleotide | | initiation |
| | | | | | biosynthesis protein | | factor 2 |
| | | | | | MobB 7.50e−3 | | (GTPase) 1e−150 |
| | | | | | :small_GTP | | |
| | | | | | small_GTP small | | |
| | | | | | GTP-binding protein | | |
| | | | | | domain 8.50e−15 | | |
| | | | | | :selB selB | | |
| | | | | | selenocysteine- | | |
| | | | | | specific translation | | |
| | | | | | elongation factor | | |
| | | | | | 1.20e−4 :EF-Tu EF- | | |
| | | | | | Tu translation | | |
| | | | | | elongation factor Tu | | |
| | | | | | 6.90e−3 :IF-2 IF-2 | | |
| | | | | | translation initiation | | |
| | | | | | factor IF-2 4.40e−08 | | |
| | | | | | :alF-2 alF-2 | | |
| | | | | | translation initiation | | |
| | | | | | factor alF-2 5.50e−213 | | |
| | | | | | :FOLD979 No | | |
| | | | | | CATH Annotation | | |
| | | | | | 2.50e−3 | | |
| 968, | NEQ497 | hypothetical protein | unnamed protein | 3.00E−04 | 0 | | |
| 969 | | | product, putative | | | | |
| | | | [Plasmodium yoelii | | | | |
| | | | yoelii]. | | | | |
| 970, | NEQ499 | hypothetical protein | hypothetical protein | 4.00E−03 | 0 | | |
| 971 | | [Pyrococcusabyssi] | [Pyrococcus abyssi]. | | | | |
| 972, | NEQ500 | hypothetical protein | predicted protein | 1.00E−05 | 0 | | |
| 973 | | | [Methanosarcina | | | | |
| | | | acetivorans str. C2A]. | | | | |
| 974, | NEQ502 | 2′-5′ RNA ligase | conserved | 1.00E−26 | 2_5_ligase 2′,5′ | 6.5.1.— | Information |
| 975 | | [Methanopyruskandleri | hypothetical protein | | RNA ligase family | | storage and |
| | | AV19] | [Methanococcus | | 6.70e−20 | | processing; Translation, |
| | | | jannaschii]. | | :2_5_ligase 2′,5′ | | ribosomal |
| | | | | | RNA ligase family | | structure and |
| | | | | | 3.40e−05 | | biogenesis; 2′- |
| | | | | | | | 5′ RNA ligase |
| | | | | | | | 1e−27 |
| 976, | NEQ501 | magnesium and | magnesium and | 1.00E−06 | 0 | | Cellular |
| 977 | | cobalt | cobalt transport | | | | processes; Inorganic |
| | | transportprotein | protein (corA) | | | | ion |
| | | (corA) [Haemophilus | [Haemophilus | | | | transport and |
| | | | influenzae Rd]. | | | | metabolism; Mg2+ |
| | | | | | | | and |
| | | | | | | | Co2+ |
| | | | | | | | transporters |
| | | | | | | | 9e−08 |
| 978, | NEQ504 | hypothetical protein | Unknown (protein for | 0.06 | 0 | | |
| 979 | | | MGC: 55710) [Danio | | | | |
| | | | rerio]. | | | | |
| 980, | NEQ503 | DNA-directed RNA | DNA-directed RNA | 0 | RNA_pol_Rpb1_2 | 2.7.7.6 | Information |
| 981 | | polymerase, subunit | polymerase, subunit A | | RNA polymerase | | storage and |
| | | A′ (rpoA1) [A. fulgidus] | (rpoA1) | | Rpb1, domain 2 | | processing; Transcription; |
| | | | [Archaeoglobus | | 1.10e−93 : 2.00e−39 | | DNA- |
| | | | fulgidus]. | | : 3.60e−91 : 8.40e−30 | | directed |
| | | | | | | | RNA |
| | | | | | | | polymerase |
| | | | | | | | beta′ |
| | | | | | | | subunit/160 kD |
| | | | | | | | subunit |
| | | | | | | | (split gene in |
| | | | | | | | archaea and |
| | | | | | | | Syn) 0 |
| 982, | NEQ506 | Predicted RNA- | hypothetical protein | 1.00E−41 | 0 | | Information |
| 983 | | binding | [Pyrococcus furiosus | | | | storage and |
| | | proteinhomologous | DSM 3638]. | | | | processing; Transcription; |
| | | to eukaryotic snRNP | | | | | Predicted |
| | | | | | | | RNA- |
| | | | | | | | binding |
| | | | | | | | protein |
| | | | | | | | homologous |
| | | | | | | | to eukaryotic |
| | | | | | | | snRNP 8e−41 |
| 984, | NEQ505 | Phenylalanyl-tRNA | Phenylalanyl-tRNA | 1.00E−74 | tRNA-synt_2d tRNA | 6.1.1. | Information |
| 985 | | synthetase | synthetase alpha | | synthetases class II | 20 | storage and |
| | | alphasubunit (pheS) | subunit (pheS) | | core domain (F) | | processing; Translation, |
| | | [S. solfataricus] | [Sulfolobus | | 4.30e−61 :pheS | | ribosomal |
| | | | solfataricus]. | | pheS phenylalanyl- | | structure and |
| | | | | | tRNA synthetase, | | biogenesis; Phenylalanyl- |
| | | | | | alpha subunit 9.20e−66 | | tRNA |
| | | | | | | | synthetase |
| | | | | | | | alpha subunit |
| | | | | | | | 7e−64 |
| 986, | NEQ507 | DNA-directed RNA | DNA-directed RNA | 2.00E−16 | RNA_pol_Rpb5_C | 2.7.7.6 | Information |
| 987 | | polymerase, subunit | polymerase, subunit H | | RNA polymerase | | storage and |
| | | H (rpoH) [Mc | (rpoH) | | Rpb5, C-terminal | | processing; Transcription; |
| | | jannaschii] | [Methanococcus | | domain 4.00e−26 | | DNA- |
| | | | jannaschii]. | | | | directed |
| | | | | | | | RNA |
| | | | | | | | polymerase, |
| | | | | | | | subunit H, |
| | | | | | | | RpoH/RPB5 |
| | | | | | | | 1e−17 |
| 988, | NEQ508 | SSU ribosomal | 30S ribosomal protein | 1.00E−57 | Ribosomal_S2 Ribosomal | | Information |
| 989 | | protein | S2 [Pyrococcus | | protein S2 3.20e−30 | | storage and |
| | | S2[Pyrococcus | horikoshii]. | | :rpsB_bact rpsB_bact | | processing; Translation, |
| | | horikoshii] | | | ribosomal protein S2 4.40e−06 | | ribosomal |
| | | | | | :Sa_S2_E_A Sa_S2_E_A | | structure and |
| | | | | | ribosomal protein S2 3.70e−98 | | biogenesis; Ribosomal |
| | | | | | | | protein S2 8e−59 |
| 990, | NEQ509 | DNA ligase; ATP | DNA ligase | 1.00E−139 | DNA_ligase ATP | 6.5.1.1 | Information |
| 991 | | dependent[Pyrococcus | [Pyrococcus abyssi]. | | dependent DNA | | storage and |
| | | abyssi] | | | ligase domain | | processing; DNA |
| | | | | | 7.30e−70 :dnl1 dnl1 | | replication, |
| | | | | | DNA ligase I, ATP- | | recombination |
| | | | | | dependent (dnl1) | | and |
| | | | | | 5.60e−163 : 4.10e−08 | | repair; ATP- |
| | | | | | : 1.10e−67 | | dependent |
| | | | | | | | DNA ligase |
| | | | | | | | 1e−140 |
| 992, | NEQ510 | hypothetical protein | putative histidine | 0.02 | 0 | | |
| 993 | | | kinase, possibly | | | | |
| | | | involved in | | | | |
| | | | competence | | | | |
| | | | [Streptococcus | | | | |
| | | | pyogenes]. | | | | |
| 994, | NEQ511 | desuccinylase | desuccinylase | 8.00E−28 | Peptidase_M20 | 3.5.1. | Metabolism; Amino |
| 995 | | [Pyrococcus | [Pyrococcus | | Peptidase family | 18 | acid |
| | | horikoshii] | horikoshii]. | | M20/M25/M40 | | transport and |
| | | | | | 1.10e−63 | | metabolism; Acetylornithine |
| | | | | | :dapE_proteo | | deacetylase/Succinyl- |
| | | | | | dapE_proteo | | diaminopimelate |
| | | | | | succinyl- | | desuccinylase |
| | | | | | diaminopimelate | | and related |
| | | | | | desuccinylase | | deacylases |
| | | | | | 1.30e−11 | | 6e−29 |
| 996, | NEQ512 | Predicted P-loop | conserved | 3.00E−37 | 0 | | Poorly |
| 997 | | ATPase[Methanopyrus | hypothetical protein | | | | characterized; |
| | | kandleri AV19] | [Methanosarcina | | | | General |
| | | | acetivorans str. C2A]. | | | | function |
| | | | | | | | prediction |
| | | | | | | | only; Predicted |
| | | | | | | | ATPase 3e−09 |
| 998, | NEQ513 | hypothetical Glu- | Glu-tRNA | 1.00E−05 | gatC gatC glutamyl- | | Information |
| 999 | | tRNA | amidotransferase, | | tRNA(Gln) | | storage and |
| | | amidotransferase, | subunit C (gatC) | | amidotransferase, C subunit | | processing; Translation, |
| | | subunit C | [Archaeoglobus | | 2.20e−4 | | ribosomal |
| | | | fulgidus]. | | | | structure and |
| | | | | | | | biogenesis; Asp- |
| | | | | | | | tRNAAsn/Glu- |
| | | | | | | | tRNAGln |
| | | | | | | | amidotransferase |
| | | | | | | | C subunit |
| | | | | | | | 7e−07 |
| 1000, | NEQ514 | hypothetical protein | exodeoxyribonuclease | 9.00E−03 | 0 | | |
| 1001 | | | V, beta chain (recB) | | | | |
| | | | [Borrelia burgdorferi]. | | | | |
| 1002, | NEQ515 | Uncharacterized | hypothetical protein | 4.00E−38 | | | |
| 1003 | | protein conserved | [Pyrococcus | | | | |
| | | inarchaea | horikoshii]. | | | | |
| | | [Methanopyrus | | | | | |
| | | kandleri] | | | | | |
| 1004, | NEQ516 | hypothetical protein | hypothetical protein | 1.00E−11 | 0 | | Cellular |
| 1005 | | | [Pyrococcus abyssi]. | | | | processes; Posttranslational |
| | | | | | | | modification, |
| | | | | | | | protein |
| | | | | | | | turnover, |
| | | | | | | | chaperones; Prefoldin, |
| | | | | | | | chaperonin |
| | | | | | | | cofactor 7e−13 |
| 1006, | NEQ518 | hypothetical protein | U30 [Human | 0.25 | 0 | | |
| 1007 | | | herpesvirus 7]. | | | | |
| 1008, | NEQ517 | translation initiation | 223aa long | 4.00E−16 | eIF6 eIF-6 family 2.30e−09 | | Information |
| 1009 | | factor 6[Sulfolobus | hypothetical | | :eIF-6 eIF-6 translation | | storage and |
| | | tokodaii] | translation initiation | | initiation factor eIF-6, | | processing; Translation, |
| | | | factor 6 [Sulfolobus | | putative 2.70e−12 | | ribosomal |
| | | | tokodaii]. | | | | structure and |
| | | | | | | | biogenesis; Eukaryotic |
| | | | | | | | translation |
| | | | | | | | initiation |
| | | | | | | | factor 6 |
| | | | | | | | (EIF6) 4e−12 |
| 1010, | NEQ519 | histidine triad (HIT) | HIT family protein (hit) | 5.00E−29 | HIT HIT family | 3.6.1. | Metabolism; Nucleotide |
| 1011 | | protein MJ0866(cell | [Methanococcus | | 2.10e−44 | 17 | transport and |
| | | cycle regulation)-M. jannaschii | jannaschii]. | | | | metabolism; Diadenosine |
| | | | | | | | tetraphosphate |
| | | | | | | | (Ap4A) |
| | | | | | | | hydrolase and |
| | | | | | | | other HIT |
| | | | | | | | family |
| | | | | | | | hydrolases |
| | | | | | | | 5e−30 |
| 1012, | NEQ520 | hypothetical protein | Sulfur transfer protein | 1.4 | 0 | | |
| 1013 | | | involved in thiamine | | | | |
| | | | biosynthesis [Aquifex | | | | |
| | | | aeolicus]. | | | | |
| 1014, | NEQ521 | Proteasome alpha | Protease subunit of | 8.00E−60 | proteasome | 3.4.25.1 | Cellular |
| 1015 | | subunit(Multicatalytic | the proteasome | | Proteasome A-type | | processes; Posttranslational |
| | | endopeptidase | [Methanopyrus | | and B-type 9.90e−40 | | modification, |
| | | | kandleri AV19]. | | | | protein |
| | | | | | | | turnover, |
| | | | | | | | chaperones; Proteasome |
| | | | | | | | protease |
| | | | | | | | subunit 6e−57 |
| 1016, | NEQ523 | n-type ATP | hypothetical protein | 7.00E−59 | UPF0021 Uncharacterized | | Cellular |
| 1017 | | pyrophosphatasesupperfamily | [Pyrococcus abyssi]. | | protein family UPF0021 | | processes; Cell |
| | | [Pyrococcus | | | 2.00e−17 :TIGR00269 | | division and |
| | | furiosus]; | | | TIGR00269 conserved | | chromosome |
| | | | | | hypothetical protein | | partitioning; Predicted |
| | | | | | TIGR00269 4.90e−13 | | ATPase of |
| | | | | | | | the PP-loop |
| | | | | | | | superfamily |
| | | | | | | | implicated in |
| | | | | | | | cell cycle |
| | | | | | | | control 5e−60 |
| 1018, | NEQ522 | Predicted N6- | conserved | 2.00E−37 | THUMP THUMP | 2.1.1.— | Information |
| 1019 | | adenine-specific | hypothetical protein | | domain 1.50e−11 | | storage and |
| | | RNAmethylase | [Methanococcus | | :UPF00200 Putative | | processing; DNA |
| | | containing THUMP | jannaschii]. | | RNA methylase | | replication, |
| | | | | | family UPF0020 | | recombination |
| | | | | | 1.00e−37 | | and |
| | | | | | :TIGR01177 | | repair; Predicted |
| | | | | | TIGR01177 | | N6- |
| | | | | | conserved | | adenine- |
| | | | | | hypothetical protein | | specific DNA |
| | | | | | TIGR01177 4.30e−19 | | methylases |
| | | | | | | | 1e−38 |
| 1020, | NEQ525 | 3′- | n-type ATP | 2.00E−33 | PAPS_reduct | 1.8.99.4 | Metabolism; Amino |
| 1021 | | phosphoadenosine | pyrophosphatase | | Phosphoadenosine | | acid |
| | | 5′- | superfamily | | phosphosulfate | | transport and |
| | | phosphosulfatesulfotransferase | [Pyrococcus furiosus | | reductase family | | metabolism; 3′- |
| | | | DSM 3638]. | | 9.30e−18 | | phosphoadenosine |
| | | | | | | | 5′- |
| | | | | | | | phosphosulfate |
| | | | | | | | sulfotransferase |
| | | | | | | | (PAPS |
| | | | | | | | reductase)/FAD |
| | | | | | | | synthetase |
| | | | | | | | and related |
| | | | | | | | enzymes 1e−30 |
| 1022, | NEQ524 | Predicted exosome | Predicted exosome | 6.00E−48 | UPF0023 Uncharacterized | | Information |
| 1023 | | subunit[Methanopyrus | subunit | | protein family UPF0023 | | storage and |
| | | kandleri AV19] | [Methanopyrus | | 8.90e−24 :TIGR00291 | | processing; Translation, |
| | | | kandleri AV19]. | | TIGR00291 conserved | | ribosomal |
| | | | | | hypothetical protein | | structure and |
| | | | | | TIGR00291 2.20e−53 | | biogenesis; Predicted |
| | | | | | | | exosome |
| | | | | | | | subunit 2e−47 |
| 1024, | NEQ526 | hypothetical | hypothetical protein | 6.00E−12 | 0 | | Information |
| 1025 | | protein(similar to | [Thermoplasma | | | | storage and |
| | | Queuine tRNA- | volcanium]. | | | | processing; Translation, |
| | | ribosyltransferase) | | | | | ribosomal |
| | | | | | | | structure and |
| | | | | | | | biogenesis; Queuine |
| | | | | | | | tRNA- |
| | | | | | | | ribosyltransferases, |
| | | | | | | | contain |
| | | | | | | | PUA domain |
| | | | | | | | 4e−13 |
| 1026, | NEQ527 | Predicted P-loop | 495aa long conserved | 1.00E−23 | DUF87 Domain of unknown | | Poorly |
| 1027 | | ATPase[Methanopyrus | hypothetical protein | | function DUF87 2.30e−07 | | characterized; |
| | | kandleri AV19] | [Sulfolobus tokodaii]. | | | | General |
| | | | | | | | function |
| | | | | | | | prediction |
| | | | | | | | only; Predicted |
| | | | | | | | ATPase 1e−17 |
| 1028, | NEQ528 | DNA-directed DNA | DNA POLYMERASE. | 4.00E−50 | DNA_pol_B DNA | 2.7.7.7 | Information |
| 1029 | | polymerase I(family | | | polymerase family B | | storage and |
| | | B) SPLIT see SEQ | | | 4.80e−4 | | processing; DNA |
| | | ID NO: 136, 137 | | | | | replication, |
| | | | | | | | recombination |
| | | | | | | | and |
| | | | | | | | repair; DNA |
| | | | | | | | polymerase |
| | | | | | | | elongation |
| | | | | | | | subunit |
| | | | | | | | (family B) 1e−46 |
| 1030, | NEQ529 | hypothetical protein | | | DUF457 Predicted membrane-bound | | |
| | | | | | metal-dependent | | |
| 1031 | | | | | hydrolase (DUF457) 6.00e−06 | | |
| 1032, | NEQ531 | putative integral | hypothetical protein | 2.00E−27 | MS_channel | | Cellular |
| 1033 | | membrane | [Nostoc sp. PCC | | Mechanosensitive ion | | processes; Cell |
| | | protein. [Streptomyces | 7120]. | | channel 1.40e−35 | | envelope |
| | | coelicolor A3(2)] | | | | | biogenesis, |
| | | | | | | | outer |
| | | | | | | | membrane; Small- |
| | | | | | | | conductance |
| | | | | | | | mechanosensitive |
| | | | | | | | channel |
| | | | | | | | 1e−22 |
| 1034, | NEQ530 | LSU ribosomal | LSU ribosomal protein | 9.00E−32 | Ribosomal_L32e Ribosomal | | Information |
| 1035 | | protein | L32E [Pyrococcus | | protein L32 6.60e−40 | | storage and |
| | | L32E[Pyrococcus | abyssi]. | | | | processing; Translation, |
| | | abyssi] | | | | | ribosomal |
| | | | | | | | structure and |
| | | | | | | | biogenesis; Ribosomal |
| | | | | | | | protein L32E |
| | | | | | | | 5e−33 |
| 1036, | NEQ532 | hypothetical protein | similar to cell wall | 4.00E−04 | 0 | | |
| 1037 | | | binding proteins | | | | |
| | | | [Listeria | | | | |
| | | | monocytogenes EGD- | | | | |
| | | | e]. | | | | |
| 1038, | NEQ533 | hypothetical protein | similar to Plasmodium | 1.4 | 0 | | |
| 1039 | | | falciparum. | | | | |
| | | | Hypothetical protein | | | | |
| | | | [Dictyostelium | | | | |
| | | | discoideum]. | | | | |
| 1040, | NEQ534 | Predicted | hypothetical protein | 6.00E−33 | 0 | | Information |
| 1041 | | transcriptional | [Pyrococcus | | | | storage and |
| | | regulator[Methanopyrus | horikoshii]. | | | | processing; Transcription; |
| | | kandleri AV19] | | | | | Predicted |
| | | | | | | | transcriptional |
| | | | | | | | regulators 8e−34 |
| 1042, | NEQ535 | aspartyl-tRNA | aspartyl-tRNA | 2.00E−92 | tRNA-synt_2 tRNA | 6.1.1. | Information |
| 1043 | | synthetase (class | synthetase | | synthetases class II | 12 | storage and |
| | | 2)[Aeropyrum pernix] | [Aeropyrum pernix]. | | (D, K and N) 3.90e−69 | | processing; Translation, |
| | | | | | :tRNA-synt_2d | | ribosomal |
| | | | | | tRNA synthetases | | structure and |
| | | | | | class II core domain | | biogenesis; Aspartyl/ |
| | | | | | (F) 3.70e−3 | | asparaginyl- |
| | | | | | :tRNA_anti OB-fold | | tRNA |
| | | | | | nucleic acid binding | | synthetases |
| | | | | | domain 6.00e−16 | | 2e−93 |
| | | | | | :asnS asnS | | |
| | | | | | asparaginyl-tRNA | | |
| | | | | | synthetase 8.00e−39 | | |
| | | | | | :aspS_arch | | |
| | | | | | aspS_arch aspartyl- | | |
| | | | | | tRNA synthetase | | |
| | | | | | 3.50e−109 | | |
| | | | | | :aspS_bact | | |
| | | | | | aspS_bact aspartyl- | | |
| | | | | | tRNA synthetase | | |
| | | | | | 3.40e−11 :genX | | |
| | | | | | genX lysyl-tRNA | | |
| | | | | | synthetase-related | | |
| | | | | | protein 1.60e−05 | | |
| | | | | | :lysS_bact | | |
| | | | | | lysS_bact lysyl- | | |
| | | | | | tRNA synthetase | | |
| | | | | | 2.00e−05 | | |
| 1044, | NEQ536 | putative nucleolar | putative nucleolar | 2.00E−78 | Nol1_Nop2_Sun | 2.1.1.— | Information |
| 1045 | | protein I (nol1-nop2- | protein I (nol1-nop2- | | NOL1/NOP2/sun | | storage and |
| | | sun family) | sun family) | | family 2.90e−49 | | processing; Translation, |
| | | [Pyrococcus | [Pyrococcus furiosus | | :nop2p nop2p | | ribosomal |
| | | | DSM 3638]. | | NOL1/NOP2/sun | | structure and |
| | | | | | family putative RNA | | biogenesis; tRNA |
| | | | | | methylase 7.50e−101 | | and rRNA |
| | | | | | :rsmB rsmB | | cytosine-C5- |
| | | | | | Sun protein 7.70e−09 | | methylases |
| | | | | | | | 3e−77 |
| 1046, | NEQ538 | acetylpolyamine | acetylpolyamine | 4.00E−40 | Hist_deacetyl | 3.5.1. | Cellular |
| 1047 | | aminohydrolase, putative | aminohydrolase, | | Histone deacetylase | 48 | processes; Signal |
| | | [Pyrobaculum | putative [Pyrobaculum | | family 2.40e−21 | | transduction |
| | | aerophilum] | aerophilum]. | | | | mechanisms; |
| | | | | | | | Deacetylases, |
| | | | | | | | including |
| | | | | | | | yeast histone |
| | | | | | | | deacetylase |
| | | | | | | | and acetoin |
| | | | | | | | utilization |
| | | | | | | | protein 2e−37 |
| 1048, | NEQ537 | proliferating-cell | proliferating-cell | 1.00E−37 | PCNA Proliferating cell | | Information |
| 1049 | | nuclear | nuclear antigen | | nuclear antigen, N-terminal | | storage and |
| | | antigen[Pyrococcus | [Pyrococcus abyssi]. | | domain 5.00e−4 :PCNA_C | | processing; DNA |
| | | abyssi] | | | Proliferating cell nuclear | | replication, |
| | | | | | antigen, C-terminal domain | | recombination |
| | | | | | 2.00e−05 :pcna pcna | | and |
| | | | | | proliferating cell nuclear | | repair; DNA |
| | | | | | antigen (pcna) 3.60e−14 | | polymerase |
| | | | | | | | sliding clamp |
| | | | | | | | subunit |
| | | | | | | | (PCNA |
| | | | | | | | homolog) 8e−39 |
| 1050, | NEQ539 | hypothetical protein | hypothetical protein | 3.00E−08 | 0 | | Cellular |
| 1051 | | [Pyrococcusfuriosus | [Pseudomonas | | | | processes; Cell |
| | | DSM 3638] | syringae pv. syringae | | | | envelope |
| | | | B728a]. | | | | biogenesis, |
| | | | | | | | outer |
| | | | | | | | membrane; Small- |
| | | | | | | | conductance |
| | | | | | | | mechanosensitive |
| | | | | | | | channel |
| | | | | | | | 3e−07 |
| 1052, | NEQ540 | transcription | transcription | 4.00E−27 | KOW KOW motif 2.10e−07 | | Information |
| 1053 | | antitermination | antitermination proteinnusG | | :L26e_arch L26e_arch | | storage and |
| | | proteinnusG | [Pyrococcus | | ribosomal protein L24 5.70e−25 | | processing; Transcription; |
| | | [Pyrococcus | furiosus DSM 3638]. | | | | Transcription |
| | | furiosus] | | | | | antiterminator |
| | | | | | | | 2e−27 |
| 1054, | NEQ541 | hypothetical | 135aa long | 800E−07 | 0 | | |
| 1055 | | transcriptional | hypothetical | | | | |
| | | regulator[Sulfolobus | transcriptional | | | | |
| | | tokodaii] | regulator [Sulfolobus | | | | |
| | | | tokodaii]. | | | | |
| 1056, | NEQ543 | elongation factor 2 | elongation factor 2 | 0 | EFG_C Elongation | 3.6.1. | Information |
| 1057 | | (EF-2); (EF- | (EF-2); (EF-2) | | factor G C-terminus | 48 | storage and |
| | | 2)[Pyrococcus | [Pyrococcus furiosus | | 1.00e−32 | | processing; Translation, |
| | | furiosus] | DSM 3638]. | | :GTP_EFTU | | ribosomal |
| | | | | | Elongation factor Tu | | structure and |
| | | | | | GTP binding domain | | biogenesis; Translation |
| | | | | | 7.10e−76 | | elongation |
| | | | | | :GTP_EFTU_D2 | | and release |
| | | | | | Elongation factor Tu | | factors |
| | | | | | domain 2 6.40e−14 | | (GTPases) 0 |
| | | | | | :small_GTP | | |
| | | | | | small_GTP small | | |
| | | | | | GTP-binding protein | | |
| | | | | | domain 5.20e−12 | | |
| | | | | | :selB selB | | |
| | | | | | selenocysteine- | | |
| | | | | | specific translation | | |
| | | | | | elongation factor | | |
| | | | | | 6.70e−3 :EF-G EF-G | | |
| | | | | | translation | | |
| | | | | | elongation factor G | | |
| | | | | | 3.90e−52 :EF-Tu EF- | | |
| | | | | | Tu translation | | |
| | | | | | elongation factor Tu | | |
| | | | | | 2.30e−4 :aEF-2 aEF- | | |
| | | | | | 2 translation | | |
| | | | | | elongation factor | | |
| | | | | | aEF-2 0.0 :prfC prfC | | |
| | | | | | peptide chain | | |
| | | | | | release factor 3 | | |
| | | | | | 4.30e−05 :EFG_IV | | |
| | | | | | Elongation factor G, | | |
| | | | | | domain IV 8.70e−24 | | |
| 1058, | NEQ542 | DNA topoisomerase | type II DNA | 1.00E−110 | TP6A_N Type IIB | 5.99. | Information |
| 1059 | | VI, subunit A(top6A) | topoisomerase | | DNA topoisomerase | 1.3 | storage and |
| | | [Pyrococcus abyssi] | subunit a [Pyrococcus | | 9.00e−30 | | processing; DNA |
| | | | furiosus DSM 3638]. | | | | replication, |
| | | | | | | | recombination |
| | | | | | | | and |
| | | | | | | | repair; DNA |
| | | | | | | | topoisomerase |
| | | | | | | | VI, subunit |
| | | | | | | | A 1e−111 |
| 1060, | NEQ545 | hypothetical protein | | | 0 | | |
| 1061 | | | | | | | |
| 1062, | NEQ544 | Predicted | Predicted membrane- | 8.00E−29 | Peptidase_M50 Peptidase | | Cellular |
| 1063 | | membrane- | associated Zn- | | family M50 9.90e−25 | | processes; Cell |
| | | associated Zn- | dependent protease | | | | envelope |
| | | dependentprotease | [Methanopyrus | | | | biogenesis, |
| | | [M. kandleri] | kandleri AV19]. | | | | outer |
| | | | | | | | membrane; Predicted |
| | | | | | | | membrane- |
| | | | | | | | associated |
| | | | | | | | Zn-dependent |
| | | | | | | | proteases 1 |
| | | | | | | | 3e−24 |
| 1064, | NEQ546 | LSU ribosomal | LSU ribosomal protein | 1.00E−35 | Ribosomal_L1 Ribosomal | | Information |
| 1065 | | protein L1P | L1P (rpl1P) | | protein L1p/L10e family | | storage and |
| | | (rpl1P)[Pyrococcus | [Pyrococcus abyssi]. | | 8.10e−39 :rplA_bact | | processing; Translation, |
| | | abyssi] | | | rplA_bact ribosomal protein | | ribosomal |
| | | | | | L1 1.40e−07 | | structure and |
| | | | | | | | biogenesis; Ribosomal |
| | | | | | | | protein L1 7e−37 |
| 1066, | NEQ548 | SSU ribosomal | SSU ribosomal | 1.00E−10 | Ribosomal_S24e Ribosomal | | Information |
| 1067 | | protein | protein S24E | | protein S24e 3.60e−11 | | storage and |
| | | S24E[Methanococcus | [Methanococcus | | | | processing; Translation, |
| | | jannaschii] | jannaschii]. | | | | ribosomal |
| | | | | | | | structure and |
| | | | | | | | biogenesis; Ribosomal |
| | | | | | | | protein S24E |
| | | | | | | | 7e−12 |
| 1068, | NEQ547 | alanyl-tRNA | alanyl-tRNA | 3.00E−64 | tRNA-synt_2c tRNA | 6.1.1.7 | Information |
| 1069 | | synthetase [Giardia | synthetase [Giardia | | synthetases class II | | storage and |
| | | | intestinalis]. | | (A) 6.50e−3 | | processing; Translation, |
| | | | | | | | ribosomal |
| | | | | | | | structure and |
| | | | | | | | biogenesis; Alanyl- |
| | | | | | | | tRNA |
| | | | | | | | synthetase |
| | | | | | | | 6e−61 |
| 1070, | NEQ549 | hypothetical protein | DNA helicase II | 4.00E−09 | 0 | | Information |
| 1071 | | | [Fusobacterium | | | | storage and |
| | | | nucleatum subsp. | | | | processing; DNA |
| | | | nucleatum ATCC | | | | replication, |
| | | | 25586]. | | | | recombination |
| | | | | | | | and |
| | | | | | | | repair; RecB |
| | | | | | | | family |
| | | | | | | | exonuclease |
| | | | | | | | 8e−07 |
| 1072, | NEQ550 | hypothetical protein | hypothetical protein | 0.01 | 0 | | |
| 1073 | | | [Plasmodium | | | | |
| | | | falciparum 3D7]. | | | | |

[0106] The invention for the first time has isolated and cultivated “Nanoarchaeum equitans,” a new nanosized hyperthermophilic archaeon derived from a submarine hot vent. This archaeon cannot be attached to any known Archaeal group, including the phyla Crenarchaeota, Korarchaeota or Euryarchaeota and therefore must represent an unknown phylum which we have named ‘Nanoarchaeota’ and species, which we name ‘Nanoarchaeum equitans’.

[0107] Cells of N. equitans are spherical, and only about 400 nm in diameter. They grow attached to the surface of a specific archaeal host, a new member of the genus Ignicoccus. The natural distribution of the ‘Nanoarchaeota’ is so far unknown. Owing to their unusual single-stranded (ss)rRNA sequence, members remained undetectable by commonly used ecological studies based on the polymerase chain reaction. ‘N. equitans’ harbors the smallest archaeal genome (SEQ ID NO:1); it is only 0.5 megabases in size. The organism of the invention will provide insight into the evolution of thermophily, of tiny genomes and of interspecies communication.

### DEFINITIONS

[0108] The term “antibody” includes a peptide or polypeptide derived from, modeled after or substantially encoded by an immunoglobulin gene or immunoglobulin genes, or fragments thereof, capable of specifically binding an antigen or epitope, see, e.g. Fundamental Immunology, Third Edition, W. E. Paul, ed., Raven Press, N.Y. (1993); Wilson (1994) J. Immunol. Methods 175:267-273; Yarmush (1992) J. Biochem. Biophys. Methods 25:85-97. The term antibody includes antigen-binding portions, i.e., “antigen binding sites,” (e.g., fragments, subsequences, complementarity determining regions (CDRs)) that retain capacity to bind antigen, including (i) a Fab fragment, a monovalent fragment consisting of the VL, VH, CL and CH1 domains; (ii) a F(ab′)2 fragment, a bivalent fragment comprising two Fab fragments linked by a disulfide bridge at the hinge region; (iii) a Fd fragment consisting of the VH and CH1 domains; (iv) a Fv fragment consisting of the VL and VH domains of a single arm of an antibody, (v) a dAb fragment (Ward et al., (1989) Nature 341:544-546), which consists of a VH domain; and (vi) an isolated complementarity determining region (CDR). Single chain antibodies are also included by reference in the term “antibody.”

[0109] The terms “array” or “microarray” or “biochip” or “chip” as used herein is a plurality of target elements, each target element comprising a defined amount of one or more polypeptides (including antibodies) or nucleic acids immobilized onto a defined area of a substrate surface, as discussed in further detail, below.

[0110] As used herein, the terms “computer,” “computer program” and “processor” are used in their broadest general contexts and incorporate all such devices, as described in detail, below.

[0111] A “coding sequence of” or a “sequence encodes” a particular polypeptide or protein, is a nucleic acid sequence which is transcribed and translated into a polypeptide or protein when placed under the control of appropriate regulatory sequences.

[0112] The term “expression cassette” as used herein refers to a nucleotide sequence which is capable of affecting expression of a structural gene (i.e., a protein coding sequence, such as an enzyme of the invention) in a host compatible with such sequences. Expression cassettes include at least a promoter operably linked with the polypeptide coding sequence; and, optionally, with other sequences, e.g., transcription termination signals. Additional factors necessary or helpful in effecting expression may also be used, e.g., enhancers. “Operably linked” as used herein refers to linkage of a promoter upstream from a DNA sequence such that the promoter mediates transcription of the DNA sequence. Thus, expression cassettes also include plasmids, expression vectors, recombinant viruses, any form of recombinant “naked DNA” vector, and the like. A “vector” comprises a nucleic acid which can infect, transfect, transiently or permanently transduce a cell. It will be recognized that a vector can be a naked nucleic acid, or a nucleic acid complexed with protein or lipid. The vector optionally comprises viral or bacterial nucleic acids and/or proteins, and/or membranes (e.g., a cell membrane, a viral lipid envelope, etc.). Vectors include, but are not limited to replicons (e.g., RNA replicons, bacteriophages) to which fragments of DNA may be attached and become replicated. Vectors thus include, but are not limited to RNA, autonomous self-replicating circular or linear DNA or RNA (e.g., plasmids, viruses, and the like, see, e.g., U.S. Pat. No. 5,217,879), and includes both the expression and non-expression plasmids. Where a recombinant microorganism or cell culture is described as hosting an “expression vector” this includes both extra-chromosomal circular and linear DNA and DNA that has been incorporated into the host chromosome(s). Where a vector is being maintained by a host cell, the vector may either be stably replicated by the cells during mitosis as an autonomous structure, or is incorporated within the host's genome.

[0113] “Plasmids” are designated by a lower case “p” preceded and/or followed by capital letters and/or numbers. The starting plasmids herein are either commercially available, publicly available on an unrestricted basis, or can be constructed from available plasmids in accord with published procedures. In addition, equivalent plasmids to those described herein are known in the art and will be apparent to the ordinarily skilled artisan.

[0114] The term “gene” means the segment of DNA involved in producing a polypeptide chain, including, inter alia, regions preceding and following the coding region, such as leader and trailer, promoters and enhancers, as well as, where applicable, intervening sequences (introns) between individual coding segments (exons).

[0115] The phrases “nucleic acid” or “nucleic acid sequence” as used herein refer to an oligonucleotide, nucleotide, polynucleotide, or to a fragment of any of these, to DNA or RNA (e.g., mRNA, rRNA, tRNA, iRNA) of genomic or synthetic origin which may be single-stranded or double-stranded and may represent a sense or antisense strand, to peptide nucleic acid (PNA), or to any DNA-like or RNA-like material, natural or synthetic in origin, including, e.g., iRNA, ribonucleoproteins (e.g., double stranded iRNAs, e.g., iRNPs). The term encompasses nucleic acids, i.e., oligonucleotides, containing known analogues of natural nucleotides. The term also encompasses nucleic-acid-like structures with synthetic backbones, see e.g., Mata (1997) Toxicol. Appl. Pharmacol. 144:189-197; Strauss-Soukup (1997) Biochemistry 36:8692-8698; Samstag (1996) Antisense Nucleic Acid Drug Dev 6:153-156.

[0116] “Amino acid” or “amino acid sequence” as used herein refer to an oligopeptide, peptide, polypeptide, or protein sequence, or to a fragment, portion, or subunit of any of these, and to naturally occurring or synthetic molecules.

[0117] The terms “polypeptide” and “protein” as used herein, refer to amino acids joined to each other by peptide bonds or modified peptide bonds, i.e., peptide isosteres, and may contain modified amino acids other than the 20 gene-encoded amino acids. The term “polypeptide” also includes peptides and polypeptide fragments, motifs and the like. The term also includes glycosylated polypeptides. The peptides and polypeptides of the invention also include all “mimetic” and “peptidomimetic” forms, as described in further detail, below.

[0118] As used herein, the term “isolated” means that the material is removed from its original environment (e.g., the natural environment if it is naturally occurring). For example, a naturally occurring polynucleotide or polypeptide present in a living animal is not isolated, but the same polynucleotide or polypeptide, separated from some or all of the coexisting materials in the natural system, is isolated. Such polynucleotides could be part of a vector and/or such polynucleotides or polypeptides could be part of a composition, and still be isolated in that such vector or composition is not part of its natural environment. As used herein, an isolated material or composition can also be a “purified” composition, i.e., it does not require absolute purity; rather, it is intended as a relative definition. Individual nucleic acids obtained from a library can be conventionally purified to electrophoretic homogeneity. In alternative aspects, the invention provides nucleic acids which have been purified from genomic DNA or from other sequences in a library or other environment by at least one, two, three, four, five or more orders of magnitude.

[0119] As used herein, the term “recombinant” means that the nucleic acid is adjacent to a “backbone” nucleic acid to which it is not adjacent in its natural environment. In one aspect, nucleic acids represent 5% or more of the number of nucleic acid inserts in a population of nucleic acid “backbone molecules.” “Backbone molecules” according to the invention include nucleic acids such as expression vectors, self-replicating nucleic acids, viruses, integrating nucleic acids, and other vectors or nucleic acids used to maintain or manipulate a nucleic acid insert of interest. In one aspect, the enriched nucleic acids represent 15%, 20%, 30%, 40%, 50%, 60%, 70%, 80%, 90% or more of the number of nucleic acid inserts in the population of recombinant backbone molecules. “Recombinant” polypeptides or proteins refer to polypeptides or proteins produced by recombinant DNA techniques; e.g., produced from cells transformed by an exogenous DNA construct encoding the desired polypeptide or protein. “Synthetic” polypeptides or protein are those prepared by chemical synthesis, as described in further detail, below.

[0120] A promoter sequence is “operably linked to” a coding sequence when RNA polymerase which initiates transcription at the promoter will transcribe the coding sequence into mRNA, as discussed further, below.

[0121] “Oligonucleotide” refers to either a single stranded polydeoxynucleotide or two complementary polydeoxynucleotide strands which may be chemically synthesized. Such synthetic oligonucleotides have no 5′ phosphate and thus will not ligate to another oligonucleotide without adding a phosphate with an ATP in the presence of a kinase. A synthetic oligonucleotide will ligate to a fragment that has not been dephosphorylated.

[0122] The phrase “substantially identical” in the context of two nucleic acids or polypeptides, refers to two or more sequences that have at least 50%, 60%, 70%, 75%, 80%, 85%, 90%, 95%, 98% or 99% nucleotide or amino acid residue (sequence) identity, when compared and aligned for maximum correspondence, as measured using one any known sequence comparison algorithm, as discussed in detail below, or by visual inspection. In alternative aspects, the invention provides nucleic acid and polypeptide sequences having substantial identity to an exemplary sequence of the invention over a region of at least about 100 residues, 150 residues, 200 residues, 300 residues, 400 residues, or a region ranging from between about 50 residues to the full length of the nucleic acid or polypeptide. Nucleic acid sequences of the invention can be substantially identical over the entire length of a polypeptide coding region.

[0123] Additionally a “substantially identical” amino acid sequence is a sequence that differs from a reference sequence by one or more conservative or non-conservative amino acid substitutions, deletions, or insertions, particularly when such a substitution occurs at a site that is not the active site of the molecule, and provided that the polypeptide essentially retains its functional properties. A conservative amino acid substitution, for example, substitutes one amino acid for another of the same class (e.g., substitution of one hydrophobic amino acid, such as isoleucine, valine, leucine, or methionine, for another, or substitution of one polar amino acid for another, such as substitution of arginine for lysine, glutamic acid for aspartic acid or glutamine for asparagine). One or more amino acids can be deleted, for example, from a polypeptide of the invention, resulting in modification of the structure of the polypeptide, without significantly altering its biological activity. For example, amino- or carboxyl-terminal amino acids that are not required for the polypeptide's biological activity can be removed. Modified polypeptide sequences of the invention can be assayed for a biological activity (e.g., enzymatic, binding, structural, and the like) by any number of methods, including contacting the modified polypeptide sequence with an enzyme substrate and determining whether the modified polypeptide decreases the amount of specific substrate in the assay or increases the bioproducts of the enzymatic reaction of a functional enzyme with the substrate, as discussed further, below.

[0124] “Hybridization” refers to the process by which a nucleic acid strand joins with a complementary strand through base pairing. Hybridization reactions can be sensitive and selective so that a particular sequence of interest can be identified even in samples in which it is present at low concentrations. Suitably stringent conditions can be defined by, for example, the concentrations of salt or formamide in the prehybridization and hybridization solutions, or by the hybridization temperature, and are well known in the art. For example, stringency can be increased by reducing the concentration of salt, increasing the concentration of formamide, or raising the hybridization temperature, altering the time of hybridization, as described in detail, below. In alternative aspects, nucleic acids of the invention are defined by their ability to hybridize under various stringency conditions (e.g., high, medium, and low), as set forth herein.

[0125] The term “variant” refers to polynucleotides or polypeptides of the invention modified at one or more base pairs, codons, introns, exons, or amino acid residues (respectively) yet still retain the biological activity of a polypeptide (e.g., an enzyme) of the invention. Variants can be produced by any number of means included methods such as, for example, error-prone PCR, shuffling, oligonucleotide-directed mutagenesis, assembly PCR, sexual PCR mutagenesis, in vivo mutagenesis, cassette mutagenesis, recursive ensemble mutagenesis, exponential ensemble mutagenesis, site-specific mutagenesis, gene reassembly, GSSM and any combination thereof. Techniques for producing variant a polypeptide (e.g., an enzyme) having activity at a pH or temperature, for example, that is different from a wild-type a polypeptide (e.g., an enzyme), are included herein.

[0126] The term “saturation mutagenesis” or “GSSM” includes a method that uses degenerate oligonucleotide primers to introduce point mutations into a polynucleotide, as described in detail, below.

[0127] The term “optimized directed evolution system” or “optimized directed evolution” includes a method for reassembling fragments of related nucleic acid sequences, e.g., related genes, and explained in detail, below.

[0128] The term “synthetic ligation reassembly” or “SLR” includes a method of ligating oligonucleotide fragments in a non-stochastic fashion, and explained in detail, below.

### Generating and Manipulating Nucleic Acids

[0129] The invention provides nucleic acids (e.g., the exemplary SEQ ID NO:1, SEQ ID NO:2, SEQ ID NO:4, SEQ ID NO:6, SEQ ID NO:8, SEQ ID NO:10, etc., including all nucleic acids disclosed in the SEQ ID listing, which include all even numbered SEQ ID NO:s from SEQ ID NO:2 through SEQ ID NO:1073), including expression cassettes such as expression vectors, encoding polypeptides (e.g., enzymes) of the invention. The invention also includes methods for discovering new polypeptide (e.g., enzyme) sequences using the nucleic acids of the invention. Also provided are methods for modifying the nucleic acids of the invention by, e.g., synthetic ligation reassembly, optimized directed evolution system and/or saturation mutagenesis.

[0130] The nucleic acids of the invention can be made, isolated and/or manipulated by, e.g., cloning and expression of cDNA libraries, amplification of message or genomic DNA by PCR, and the like. In practicing the methods of the invention, homologous genes can be modified by manipulating a template nucleic acid, as described herein. The invention can be practiced in conjunction with any method or protocol or device known in the art, which are well described in the scientific and patent literature.

[0131] General Techniques

[0132] The nucleic acids used to practice this invention, whether RNA, iRNA, antisense nucleic acid, cDNA, genomic DNA, vectors, viruses or hybrids thereof, may be isolated from a variety of sources, genetically engineered, amplified, and/or expressed/generated recombinantly. Recombinant polypeptides generated from these nucleic acids can be individually isolated or cloned and tested for a desired activity. Any recombinant expression system can be used, including bacterial, mammalian, yeast, insect or plant cell expression systems.

[0133] Alternatively, these nucleic acids can be synthesized in vitro by well-known chemical synthesis techniques, as described in, e.g., Adams (1983) J. Am. Chem. Soc. 105:661; Belousov (1997) Nucleic Acids Res. 25:3440-3444; Frenkel (1995) Free Radic. Biol. Med. 19:373-380; Blommers (1994) Biochemistry 33:7886-7896; Narang (1979) Meth. Enzymol. 68:90; Brown (1979) Meth. Enzymol. 68:109; Beaucage (1981) Tetra. Lett. 22:1859; U.S. Pat. No. 4,458,066.

[0134] Techniques for the manipulation of nucleic acids, such as, e.g., subcloning, labeling probes (e.g., random-primer labeling using Klenow polymerase, nick translation, amplification), sequencing, hybridization and the like are well described in the scientific and patent literature, see, e.g., Sambrook, ed., MOLECULAR CLONING: A LABORATORY MANUAL (2ND ED.), Vols. 1-3, Cold Spring Harbor Laboratory, (1989); CURRENT PROTOCOLS IN MOLECULAR BIOLOGY, Ausubel, ed. John Wiley & Sons, Inc., New York (1997); LABORATORY TECHNIQUES IN BIOCHEMISTRY AND MOLECULAR BIOLOGY: HYBRIDIZATION WITH NUCLEIC ACID PROBES, Part I. Theory and Nucleic Acid Preparation, Tijssen, ed. Elsevier, N.Y. (1993).

[0135] Another useful means of obtaining and manipulating nucleic acids used to practice the methods of the invention is to clone from genomic samples, and, if desired, screen and re-clone inserts isolated or amplified from, e.g., genomic clones or cDNA clones. Sources of nucleic acid used in the methods of the invention include genomic or cDNA libraries contained in, e.g., mammalian artificial chromosomes (MACs), see, e.g., U.S. Pat. Nos. 5,721,118; 6,025,155; human artificial chromosomes, see, e.g., Rosenfeld (1997) Nat. Genet. 15:333-335; yeast artificial chromosomes (YAC); bacterial artificial chromosomes (BAC); P1 artificial chromosomes, see, e.g., Woon (1998) Genomics 50:306-316; P1-derived vectors (PACs), see, e.g., Kern (1997) Biotechniques 23:120-124; cosmids, recombinant viruses, phages or plasmids.

[0136] In one aspect, a nucleic acid encoding a polypeptide of the invention is assembled in appropriate phase with a leader sequence capable of directing secretion of the translated polypeptide or fragment thereof.

[0137] The invention provides fusion proteins and nucleic acids encoding them. A polypeptide of the invention can be fused to a heterologous peptide or polypeptide, such as N-terminal identification peptides which impart desired characteristics, such as increased stability or simplified purification. Peptides and polypeptides of the invention can also be synthesized and expressed as fusion proteins with one or more additional domains linked thereto for, e.g., producing a more immunogenic peptide, to more readily isolate a recombinantly synthesized peptide, to identify and isolate antibodies and antibody-expressing B cells, and the like. Detection and purification facilitating domains include, e.g., metal chelating peptides such as polyhistidine tracts and histidine-tryptophan modules that allow purification on immobilized metals, protein A domains that allow purification on immobilized immunoglobulin, and the domain utilized in the FLAGS extension/affinity purification system (Immunex Corp, Seattle Wash.). The inclusion of a cleavable linker sequences such as Factor Xa or enterokinase (Invitrogen, San Diego Calif.) between a purification domain and the motif-comprising peptide or polypeptide to facilitate purification. For example, an expression vector can include an epitope-encoding nucleic acid sequence linked to six histidine residues followed by a thioredoxin and an enterokinase cleavage site (see e.g., Williams (1995) Biochemistry 34:1787-1797; Dobeli (1998) Protein Expr. Purif. 12:404-414). The histidine residues facilitate detection and purification while the enterokinase cleavage site provides a means for purifying the epitope from the remainder of the fusion protein. Technology pertaining to vectors encoding fusion proteins and application of fusion proteins are well described in the scientific and patent literature, see e.g., Kroll (1993) DNA Cell. Biol., 12:441-53.

[0138] Transcriptional and Translational Control Sequences

[0139] The invention provides nucleic acid (e.g., DNA) sequences of the invention operatively linked to expression (e.g., transcriptional or translational) control sequence(s), e.g., promoters or enhancers, to direct or modulate RNA synthesis/expression. The expression control sequence can be in an expression vector. Exemplary bacterial promoters include lac, lacZ, T3, T7, gpt, lambda PR, PL and trp. Exemplary eukaryotic promoters include CMV immediate early, HSV thymidine kinase, early and late SV40, LTRs from retrovirus, and mouse metallothionein I.

[0140] Promoters suitable for expressing a polypeptide in bacteria include the E. coli lac or trp promoters, the lacI promoter, the lacZ promoter, the T3 promoter, the T7 promoter, the gpt promoter, the lambda PR promoter, the lambda PL promoter, promoters from operons encoding glycolytic enzymes such as 3-phosphoglycerate kinase (PGK), and the acid phosphatase promoter. Eukaryotic promoters include the CMV immediate early promoter, the HSV thymidine kinase promoter, heat shock promoters, the early and late SV40 promoter, LTRs from retroviruses, and the mouse metallothionein-I promoter. Other promoters known to control expression of genes in prokaryotic or eukaryotic cells or their viruses may also be used.

[0141] Expression Vectors and Cloning Vehicles

[0142] The invention provides expression vectors and cloning vehicles comprising nucleic acids of the invention, e.g., sequences encoding polypeptides (e.g., enzymes) of the invention. Expression vectors and cloning vehicles of the invention can comprise viral particles, baculovirus, phage, plasmids, phagemids, cosmids, fosmids, bacterial artificial chromosomes, viral DNA (e.g., vaccinia, adenovirus, foul pox virus, pseudorabies and derivatives of SV40), P1-based artificial chromosomes, yeast plasmids, yeast artificial chromosomes, and any other vectors specific for specific hosts of interest (such as bacillus, Aspergillus and yeast). Vectors of the invention can include chromosomal, non-chromosomal and synthetic DNA sequences. Large numbers of suitable vectors are known to those of skill in the art, and are commercially available. Exemplary vectors are include: bacterial: pQE vectors (Qiagen), pBluescript plasmids, pNH vectors, (lambda-ZAP vectors (Stratagene); ptrc99a, pKK223-3, pDR540, pRIT2T (Pharmacia); Eukaryotic: pXT1, pSG5 (Stratagene), pSVK3, pBPV, pMSG, pSVLSV40 (Pharmacia). However, any other plasmid or other vector may be used so long as they are replicable and viable in the host. Low copy number or high copy number vectors may be employed with the present invention.

[0143] The expression vector may comprise a promoter, a ribosome-binding site for translation initiation and a transcription terminator. The vector may also include appropriate sequences for amplifying expression. Mammalian expression vectors can comprise an origin of replication, any necessary ribosome binding sites, a polyadenylation site, splice donor and acceptor sites, transcriptional termination sequences, and 5′ flanking non-transcribed sequences. In some aspects, DNA sequences derived from the SV40 splice and polyadenylation sites may be used to provide the required non-transcribed genetic elements.

[0144] In one aspect, the expression vectors contain one or more selectable marker genes to permit selection of host cells containing the vector. Such selectable markers include genes encoding dihydrofolate reductase or genes conferring neomycin resistance for eukaryotic cell culture, genes conferring tetracycline or ampicillin resistance in E. coli, and the S. cerevisiae TRP1 gene. Promoter regions can be selected from any desired gene using chloramphenicol transferase (CAT) vectors or other vectors with selectable markers.

[0145] Vectors for expressing the polypeptide or fragment thereof in eukaryotic cells may also contain enhancers to increase expression levels. Enhancers are cis-acting elements of DNA, usually from about 10 to about 300 bp in length that act on a promoter to increase its transcription. Examples include the SV40 enhancer on the late side of the replication origin bp 100 to 270, the cytomegalovirus early promoter enhancer, the polyoma enhancer on the late side of the replication origin, and the adenovirus enhancers.

[0146] A DNA sequence may be inserted into a vector by a variety of procedures. In general, the DNA sequence is ligated to the desired position in the vector following digestion of the insert and the vector with appropriate restriction endonucleases. Alternatively, blunt ends in both the insert and the vector may be ligated. A variety of cloning techniques are known in the art, e.g., as described in Ausubel and Sambrook. Such procedures and others are deemed to be within the scope of those skilled in the art.

[0147] The vector may be in the form of a plasmid, a viral particle, or a phage. Other vectors include chromosomal, non-chromosomal and synthetic DNA sequences, derivatives of SV40; bacterial plasmids, phage DNA, baculovirus, yeast plasmids, vectors derived from combinations of plasmids and phage DNA, viral DNA such as vaccinia, adenovirus, fowl pox virus, and pseudorabies. A variety of cloning and expression vectors for use with prokaryotic and eukaryotic hosts are described by, e.g., Sambrook.

[0148] Particular bacterial vectors which may be used include the commercially available plasmids comprising genetic elements of the well known cloning vector pBR322 (ATCC 37017), pKK223-3 (Pharmacia Fine Chemicals, Uppsala, Sweden), GEM1 (Promega Biotec, Madison, Wis., USA) pQE70, pQE60, pQE-9 (Qiagen), pD10, psiX174 pBluescript II KS, pNH8A, pNH16a, pNH18A, pNH46A (Stratagene), ptrc99a, pKK223-3, pKK233-3, pDR540, pRIT5 (Pharmacia), pKK232-8 and pCM7. Particular eukaryotic vectors include pSV2CAT, pOG44, pXT1, pSG (Stratagene) pSVK3, pBPV, pMSG, and pSVL (Pharmacia). However, any other vector may be used as long as it is replicable and viable in the host cell.

[0149] Host Cells and Transformed Cells

[0150] The invention also provides a transformed cell comprising a nucleic acid sequence of the invention, e.g., a sequence encoding polypeptides (e.g., enzymes) of the invention, a vector of the invention. The host cell may be any of the host cells familiar to those skilled in the art, including prokaryotic cells, eukaryotic cells, such as bacterial cells, fungal cells, yeast cells, mammalian cells, insect cells, or plant cells. Exemplary bacterial cells include E. coli, Streptomyces, Bacillus subtilis, Salmonella typhimurium and various species within the genera Pseudomonas, Streptomyces, and Staphylococcus. Exemplary insect cells include Drosophila S2 and Spodoptera Sf9. Exemplary animal cells include CHO, COS or Bowes melanoma or any mouse or human cell line. The selection of an appropriate host is within the abilities of those skilled in the art.

[0151] The vector may be introduced into the host cells using any of a variety of techniques, including transformation, transfection, transduction, viral infection, gene guns, or Ti-mediated gene transfer. Particular methods include calcium phosphate transfection, DEAE-Dextran mediated transfection, lipofection, or electroporation (Davis, L., Dibner, M., Battey, I., Basic Methods in Molecular Biology, (1986)).

[0152] Where appropriate, the engineered host cells can be cultured in conventional nutrient media modified as appropriate for activating promoters, selecting transformants or amplifying the genes of the invention. Following transformation of a suitable host strain and growth of the host strain to an appropriate cell density, the selected promoter may be induced by appropriate means (e.g., temperature shift or chemical induction) and the cells may be cultured for an additional period to allow them to produce the desired polypeptide or fragment thereof.

[0153] Cells can be harvested by centrifugation, disrupted by physical or chemical means, and the resulting crude extract is retained for further purification. Microbial cells employed for expression of proteins can be disrupted by any convenient method, including freeze-thaw cycling, sonication, mechanical disruption, or use of cell lysing agents. Such methods are well known to those skilled in the art. The expressed polypeptide or fragment thereof can be recovered and purified from recombinant cell cultures by methods including ammonium sulfate or ethanol precipitation, acid extraction, anion or cation exchange chromatography, phosphocellulose chromatography, hydrophobic interaction chromatography, affinity chromatography, hydroxylapatite chromatography and lectin chromatography. Protein refolding steps can be used, as necessary, in completing configuration of the polypeptide. If desired, high performance liquid chromatography (HPLC) can be employed for final purification steps.

[0154] Various mammalian cell culture systems can also be employed to express recombinant protein. Examples of mammalian expression systems include the COS-7 lines of monkey kidney fibroblasts and other cell lines capable of expressing proteins from a compatible vector, such as the C127, 3T3, CHO, HeLa and BHK cell lines.

[0155] The constructs in host cells can be used in a conventional manner to produce the gene product encoded by the recombinant sequence. Depending upon the host employed in a recombinant production procedure, the polypeptides produced by host cells containing the vector may be glycosylated or may be non-glycosylated. Polypeptides of the invention may or may not also include an initial methionine amino acid residue.

[0156] Cell-free translation systems can also be employed to produce a polypeptide of the invention. Cell-free translation systems can use mRNAs transcribed from a DNA construct comprising a promoter operably linked to a nucleic acid encoding the polypeptide or fragment thereof. In some aspects, the DNA construct may be linearized prior to conducting an in vitro transcription reaction. The transcribed mRNA is then incubated with an appropriate cell-free translation extract, such as a rabbit reticulocyte extract, to produce the desired polypeptide or fragment thereof.

[0157] The expression vectors can contain one or more selectable marker genes to provide a phenotypic trait for selection of transformed host cells such as dihydrofolate reductase or neomycin resistance for eukaryotic cell culture, or such as tetracycline or ampicillin resistance in E. coli.

### Amplification of Nucleic Acids

[0158] In practicing the invention, nucleic acids encoding the polypeptides of the invention, or modified nucleic acids, can be reproduced by, e.g., amplification. The invention provides amplification primer sequence pairs for amplifying nucleic acids encoding polypeptides (e.g., enzymes) of the invention. In one aspect, the primer pairs are capable of amplifying nucleic acid sequences of the invention, e.g., including the exemplary SEQ ID NO:1, SEQ ID NO:2, SEQ ID NO:4, SEQ ID NO:6, SEQ ID NO:8, SEQ ID NO:10, etc., including all nucleic acids disclosed in the SEQ ID listing, which include all even numbered SEQ ID NO:s from SEQ ID NO:2 through SEQ ID NO:1073, or a subsequence thereof, etc. One of skill in the art can design amplification primer sequence pairs for any part of or the full length of these sequences.

[0159] The invention provides an amplification primer sequence pair for amplifying a nucleic acid encoding a polypeptide of the invention, wherein the primer pair is capable of amplifying a nucleic acid comprising a sequence of the invention, or fragments or subsequences thereof. One or each member of the amplification primer sequence pair can comprise an oligonucleotide comprising at least about 10 to 50 consecutive bases of the sequence, or about 12, 13, 14, 15, 16, 17, 18, 19, 20, 21, 22, 23, 24, or 25 consecutive bases of the sequence.

[0160] The invention provides amplification primer pairs, wherein the primer pair comprises a first member having a sequence as set forth by about the first (the 5′) 12, 13, 14, 15, 16, 17, 18, 19, 20, 21, 22, 23, 24, or 25 residues of a nucleic acid of the invention, and a second member having a sequence as set forth by about the first (the 5′) 12, 13, 14, 15, 16, 17, 18, 19, 20, 21, 22, 23, 24, or 25 residues of the complementary strand of the first member. The invention provides polypeptides (e.g., enzymes) generated by amplification, e.g., polymerase chain reaction (PCR), using an amplification primer pair of the invention. The invention provides methods of making polypeptides (e.g., enzymes) by amplification, e.g., polymerase chain reaction (PCR), using an amplification primer pair of the invention. In one aspect, the amplification primer pair amplifies a nucleic acid from a library, e.g., a gene library, such as an environmental library.

[0161] Amplification reactions can also be used to quantify the amount of nucleic acid in a sample (such as the amount of message in a cell sample), label the nucleic acid (e.g., to apply it to an array or a blot), detect the nucleic acid, or quantify the amount of a specific nucleic acid in a sample. In one aspect of the invention, message isolated from a cell or a cDNA library are amplified. The skilled artisan can select and design suitable oligonucleotide amplification primers. Amplification methods are also well known in the art, and include, e.g., polymerase chain reaction, PCR (see, e.g., PCR PROTOCOLS, A GUIDE TO METHODS AND APPLICATIONS, ed. Innis, Academic Press, N.Y. (1990) and PCR STRATEGIES (1995), ed. Innis, Academic Press, Inc., N.Y., ligase chain reaction (LCR) (see, e.g., Wu (1989) Genomics 4:560; Landegren (1988) Science 241:1077; Barringer (1990) Gene 89:117); transcription amplification (see, e.g., Kwoh (1989) Proc. Natl. Acad. Sci. USA 86:1173); and, self-sustained sequence replication (see, e.g., Guatelli (1990) Proc. Natl. Acad. Sci. USA 87:1874); Q Beta replicase amplification (see, e.g., Smith (1997) J. Clin. Microbiol. 35:1477-1491), automated Q-beta replicase amplification assay (see, e.g., Burg (1996) Mol. Cell. Probes 10:257-271) and other RNA polymerase mediated techniques (e.g., NASBA, Cangene, Mississauga, Ontario); see also Berger (1987) Methods Enzymol. 152:307-316; Sambrook; Ausubel; U.S. Pat. Nos. 4,683,195 and 4,683,202; Sooknanan (1995) Biotechnology 13:563-564.

### Determining the Degree of Sequence Identity

[0162] The invention provides nucleic acids comprising sequences having at least about 50%, 51%, 52%, 53%, 54%, 55%, 56%, 57%, 58%, 59%, 60%, 61%, 62%, 63%, 64%, 65%, 66%, 67%, 68%, 69%, 70%, 71%, 72%, 73%, 74%, 75%, 76%, 77%, 78%, 79%, 80%, 81%, 82%, 83%, 84%, 85%, 86%, 87%, 88%, 89%, 90%, 91%, 92%, 93%, 94%, 95%, 96%, 97%, 98%, 99%, or more, or complete (100%) sequence identity to an exemplary nucleic acid of the invention (e.g., SEQ ID NO:1, SEQ ID NO:2, SEQ ID NO:4, SEQ ID NO:6, SEQ ID NO:8, SEQ ID NO:10, etc., including all nucleic acids disclosed in the SEQ ID listing, which include all even numbered SEQ ID NO:s from SEQ ID NO:2 through SEQ ID NO:1073, and nucleic acids encoding SEQ ID NO:3, SEQ ID NO:5, SEQ ID NO:7, SEQ ID NO:9, SEQ ID NO:11, etc., and all polypeptides disclosed in the SEQ ID listing, which include all odd numbered SEQ ID NO:s from SEQ ID NO:3 through SEQ ID NO:1073) over a region of at least about 50, 75, 100, 150, 200, 250, 300, 350, 400, 450, 500, 550, 600, 650, 700, 750, 800, 850, 900, 950, 1000, 1050, 1100, 1150, 1200, 1250, 1300, 1350, 1400, 1450, 1500, 1550 or more, residues. The invention provides polypeptides comprising sequences having at least about 50%, 51%, 52%, 53%, 54%, 55%, 56%, 57%, 58%, 59%, 60%, 61%, 62%, 63%, 64%, 65%, 66%, 67%, 68%, 69%, 70%, 71%, 72%, 73%, 74%, 75%, 76%, 77%, 78%, 79%, 80%, 81%, 82%, 83%, 84%, 85%, 86%, 87%, 88%, 89%, 90%, 91%, 92%, 93%, 94%, 95%, 96%, 97%, 98%, 99%, or more, or complete (100%) sequence identity to an exemplary polypeptide of the invention. The extent of sequence identity (homology) may be determined using any computer program and associated parameters, including those described herein, such as BLAST 2.2.2. or FASTA version 3.0t78, with the default parameters.

[0163] In alternative embodiments, the sequence identify can be over a region of at least about 5, 10, 20, 30, 40, 50, 100, 150, 200, 250, 300, 350, 400 consecutive residues, or the full length of the nucleic acid or polypeptide. The extent of sequence identity (homology) may be determined using any computer program and associated parameters, including those described herein, such as BLAST 2.2.2. or FASTA version 3.0t78, with the default parameters.

[0164] Homologous sequences also include RNA sequences in which uridines replace the thymines in the nucleic acid sequences. The homologous sequences may be obtained using any of the procedures described herein or may result from the correction of a sequencing error. It will be appreciated that the nucleic acid sequences as set forth herein can be represented in the traditional single character format (see, e.g., Stryer, Lubert. Biochemistry, 3rd Ed., W. H Freeman & Co., New York) or in any other format which records the identity of the nucleotides in a sequence.

[0165] Various sequence comparison programs identified herein are used in this aspect of the invention. Protein and/or nucleic acid sequence identities (homologies) may be evaluated using any of the variety of sequence comparison algorithms and programs known in the art. Such algorithms and programs include, but are not limited to, TBLASTN, BLASTP, FASTA, TFASTA, and CLUSTALW (Pearson and Lipman, Proc. Natl. Acad. Sci. USA 85(8):2444-2448, 1988; Altschul et al., J. Mol. Biol. 215(3):403-410, 1990; Thompson et al., Nucleic Acids Res. 22(2):4673-4680, 1994; Higgins et al., Methods Enzymol. 266:383-402, 1996; Altschul et al., J. Mol. Biol. 215(3):403-410, 1990; Altschul et al., Nature Genetics 3:266-272, 1993).

[0166] Homology or identity can be measured using sequence analysis software (e.g., Sequence Analysis Software Package of the Genetics Computer Group, University of Wisconsin Biotechnology Center, 1710 University Avenue, Madison, Wis. 53705). Such software matches similar sequences by assigning degrees of homology to various deletions, substitutions and other modifications. The terms “homology” and “identity” in the context of two or more nucleic acids or polypeptide sequences, refer to two or more sequences or subsequences that are the same or have a specified percentage of amino acid residues or nucleotides that are the same when compared and aligned for maximum correspondence over a comparison window or designated region as measured using any number of sequence comparison algorithms or by manual alignment and visual inspection. For sequence comparison, one sequence can act as a reference sequence (e.g., an exemplary sequence SEQ ID NO:1, SEQ ID NO:2, SEQ ID NO:4, SEQ ID NO:6, SEQ ID NO:8, SEQ ID NO:10, etc., including all nucleic acids disclosed in the SEQ ID listing, which include all even numbered SEQ ID NO:s from SEQ ID NO:2 through SEQ ID NO:1073) to which test sequences are compared. When using a sequence comparison algorithm, test and reference sequences are entered into a computer, subsequence coordinates are designated, if necessary, and sequence algorithm program parameters are designated. Default program parameters can be used, or alternative parameters can be designated. The sequence comparison algorithm then calculates the percent sequence identities for the test sequences relative to the reference sequence, based on the program parameters.

[0167] A “comparison window”, as used herein, includes reference to a segment of any one of the number of contiguous residues. For example, in alternative aspects of the invention, contiguous residues ranging anywhere from 20 to the full length of an exemplary sequence of the invention are compared to a reference sequence of the same number of contiguous positions after the two sequences are optimally aligned. If the reference sequence has the requisite sequence identity to an exemplary sequence of the invention, e.g., 50%, 51%, 52%, 53%, 54%, 55%, 56%, 57%, 58%, 59%, 60%, 61%, 62%, 63%, 64%, 65%, 66%, 67%, 68%, 69%, 70%, 71%, 72%, 73%, 74%, 75%, 76%, 77%, 78%, 79%, 80%, 81%, 82%, 83%, 84%, 85%, 86%, 87%, 88%, 89%, 90%, 91%, 92%, 93%, 94%, 95%, 96%, 97%, 98%, 99%, or more sequence identity to a sequence of the invention, that sequence is within the scope of the invention. In alternative embodiments, subsequences ranging from about 20 to 600, about 50 to 200, and about 100 to 150 are compared to a reference sequence of the same number of contiguous positions after the two sequences are optimally aligned. Methods of alignment of sequence for comparison are well-known in the art. Optimal alignment of sequences for comparison can be conducted, e.g., by the local homology algorithm of Smith & Waterman, Adv. Appl. Math. 2:482, 1981, by the homology alignment algorithm of Needleman & Wunsch, J. Mol. Biol. 48:443, 1970, by the search for similarity method of person & Lipman, Proc. Nat'l. Acad. Sci. USA 85:2444, 1988, by computerized implementations of these algorithms (GAP, BESTFIT, FASTA, and TFASTA in the Wisconsin Genetics Software Package, Genetics Computer Group, 575 Science Dr., Madison, Wis.), or by manual alignment and visual inspection. Other algorithms for determining homology or identity include, for example, in addition to a BLAST program (Basic Local Alignment Search Tool at the National Center for Biological Information), ALIGN, AMAS (Analysis of Multiply Aligned Sequences), AMPS (Protein Multiple Sequence Alignment), ASSET (Aligned Segment Statistical Evaluation Tool), BANDS, BESTSCOR, BIOSCAN (Biological Sequence Comparative Analysis Node), BLIMPS (BLocks IMProved Searcher), FASTA, Intervals & Points, BMB, CLUSTAL V, CLUSTAL W, CONSENSUS, LCONSENSUS, WCONSENSUS, Smith-Waterman algorithm, DARWIN, Las Vegas algorithm, FNAT (Forced Nucleotide Alignment Tool), Framealign, Framesearch, DYNAMIC, FILTER, FSAP (Fristensky Sequence Analysis Package), GAP (Global Alignment Program), GENAL, GIBBS, GenQuest, ISSC (Sensitive Sequence Comparison), LALIGN (Local Sequence Alignment), LCP (Local Content Program), MACAW (Multiple Alignment Construction & Analysis Workbench), MAP (Multiple Alignment Program), MBLKP, MBLKN, PIMA (Pattern-Induced Multi-sequence Alignment), SAGA (Sequence Alignment by Genetic Algorithm) and WHAT-IF. Such alignment programs can also be used to screen genome databases to identify polynucleotide sequences having substantially identical sequences. A number of genome databases are available, for example, a substantial portion of the human genome is available as part of the Human Genome Sequencing Project (Gibbs, 1995). Several genomes have been sequenced, e.g., M. genitalium (Fraser et al., 1995), M. jannaschii (Bult et al., 1996), H. influenzae (Fleischmann et al., 1995), E. coli (Blattner et al., 1997), and yeast (S. cerevisiae) (Mewes et al., 1997), and D. melanogaster (Adams et al., 2000). Significant progress has also been made in sequencing the genomes of model organism, such as mouse, C. elegans, and Arabadopsis sp. Databases containing genomic information annotated with some functional information are maintained by different organization, and are accessible via the internet.

[0168] BLAST, BLAST 2.0 and BLAST 2.2.2 algorithms are also used to practice the invention. They are described, e.g., in Altschul (1977) Nuc. Acids Res. 25:3389-3402; Altschul (1990) J. Mol. Biol. 215:403-410. Software for performing BLAST analyses is publicly available through the National Center for Biotechnology Information. This algorithm involves first identifying high scoring sequence pairs (HSPs) by identifying short words of length W in the query sequence, which either match or satisfy some positive-valued threshold score T when aligned with a word of the same length in a database sequence. T is referred to as the neighborhood word score threshold (Altschul (1990) supra). These initial neighborhood word hits act as seeds for initiating searches to find longer HSPs containing them. The word hits are extended in both directions along each sequence for as far as the cumulative alignment score can be increased. Cumulative scores are calculated using, for nucleotide sequences, the parameters M (reward score for a pair of matching residues; always >0). For amino acid sequences, a scoring matrix is used to calculate the cumulative score. Extension of the word hits in each direction are halted when: the cumulative alignment score falls off by the quantity X from its maximum achieved value; the cumulative score goes to zero or below, due to the accumulation of one or more negative-scoring residue alignments; or the end of either sequence is reached. The BLAST algorithm parameters W, T, and X determine the sensitivity and speed of the alignment. The BLASTN program (for nucleotide sequences) uses as defaults a wordlength (W) of 11, an expectation (E) of 10, M=5, N=−4 and a comparison of both strands. For amino acid sequences, the BLASTP program uses as defaults a wordlength of 3, and expectations (E) of 10, and the BLOSUM62 scoring matrix (see Henikoff & Henikoff (1989) Proc. Natl. Acad. Sci. USA 89:10915) alignments (B) of 50, expectation (E) of 10, M=5, N=−4, and a comparison of both strands. The BLAST algorithm also performs a statistical analysis of the similarity between two sequences (see, e.g., Karlin & Altschul (1993) Proc. Natl. Acad. Sci. USA 90:5873). One measure of similarity provided by BLAST algorithm is the smallest sum probability (P(N)), which provides an indication of the probability by which a match between two nucleotide or amino acid sequences would occur by chance. For example, a nucleic acid is considered similar to a references sequence if the smallest sum probability in a comparison of the test nucleic acid to the reference nucleic acid is less than about 0.2, more preferably less than about 0.01, and most preferably less than about 0.001. In one aspect, protein and nucleic acid sequence homologies are evaluated using the Basic Local Alignment Search Tool (“BLAST”). For example, five specific BLAST programs can be used to perform the following task: (1) BLASTP and BLAST3 compare an amino acid query sequence against a protein sequence database; (2) BLASTN compares a nucleotide query sequence against a nucleotide sequence database; (3) BLASTX compares the six-frame conceptual translation products of a query nucleotide sequence (both strands) against a protein sequence database; (4) TBLASTN compares a query protein sequence against a nucleotide sequence database translated in all six reading frames (both strands); and, (5) TBLASTX compares the six-frame translations of a nucleotide query sequence against the six-frame translations of a nucleotide sequence database. The BLAST programs identify homologous sequences by identifying similar segments, which are referred to herein as “high-scoring segment pairs,” between a query amino or nucleic acid sequence and a test sequence which is preferably obtained from a protein or nucleic acid sequence database. High-scoring segment pairs are preferably identified (i.e., aligned) by means of a scoring matrix, many of which are known in the art. Preferably, the scoring matrix used is the BLOSUM62 matrix (Gonnet et al., Science 256:1443-1445, 1992; Henikoff and Henikoff, Proteins 17:49-61, 1993). Less preferably, the PAM or PAM250 matrices may also be used (see, e.g., Schwartz and Dayhoff, eds., 1978, Matrices for Detecting Distance Relationships: Atlas of Protein Sequence and Structure, Washington: National Biomedical Research Foundation).

[0169] In one aspect of the invention, to determine if a nucleic acid has the requisite sequence identity to be within the scope of the invention, the NCBI BLAST 2.2.2 programs is used. default options to blastp. There are about 38 setting options in the BLAST 2.2.2 program. In this exemplary aspect of the invention, all default values are used except for the default filtering setting (i.e., all parameters set to default except filtering which is set to OFF); in its place a “-F F” setting is used, which disables filtering. Use of default filtering often results in Karlin-Altschul violations due to short length of sequence.

[0170] The default values used in this exemplary aspect of the invention include:
[0171] “Filter for low complexity: ON
[0172] >Word Size: 3
[0173] >Matrix: Blosum62
[0174] >Gap Costs: Existence: 11
[0175] >Extension: 1”

[0176] Other default settings are: filter for low complexity OFF, word size of 3 for protein, BLOSUM62 matrix, gap existence penalty of −11 and a gap extension penalty of −1.

[0177] An exemplary NCBI BLAST 2.2.2 program setting is set forth in Example 1, below. Note that the “-W” option defaults to 0. This means that, if not set, the word size defaults to 3 for proteins and 11 for nucleotides.

### Computer Systems and Computer Program Products

[0178] To determine and identify sequence identities, structural homologies, motifs and the like in silico the sequence of the invention can be stored, recorded, and manipulated on any medium which can be read and accessed by a computer. Accordingly, the invention provides computers, computer systems, computer readable mediums, computer programs products and the like recorded or stored thereon the nucleic acid and polypeptide sequences of the invention, e.g., an exemplary sequence of the invention. As used herein, the words “recorded” and “stored” refer to a process for storing information on a computer medium. A skilled artisan can readily adopt any known methods for recording information on a computer readable medium to generate manufactures comprising one or more of the nucleic acid and/or polypeptide sequences of the invention.

[0179] Another aspect of the invention is a computer readable medium having recorded thereon at least one nucleic acid and/or polypeptide sequence of the invention. Computer readable media include magnetically readable media, optically readable media, electronically readable media and magnetic/optical media. For example, the computer readable media may be a hard disk, a floppy disk, a magnetic tape, CD-ROM, Digital Versatile Disk (DVD), Random Access Memory (RAM), or Read Only Memory (ROM) as well as other types of other media known to those skilled in the art.

[0180] Aspects of the invention include systems (e.g., internet based systems), particularly computer systems, which store and manipulate the sequences and sequence information described herein. One example of a computer system 100 is illustrated in block diagram form in FIG. 1. As used herein, “a computer system” refers to the hardware components, software components, and data storage components used to analyze a nucleotide or polypeptide sequence of the invention. The computer system 100 can include a processor for processing, accessing and manipulating the sequence data. The processor 105 can be any well-known type of central processing unit, such as, for example, the Pentium III from Intel Corporation, or similar processor from Sun, Motorola, Compaq, AMD or International Business Machines. The computer system 100 is a general purpose system that comprises the processor 105 and one or more internal data storage components 110 for storing data, and one or more data retrieving devices for retrieving the data stored on the data storage components. A skilled artisan can readily appreciate that any one of the currently available computer systems are suitable.

[0181] In one aspect, the computer system 100 includes a processor 105 connected to a bus which is connected to a main memory 115 (preferably implemented as RAM) and one or more internal data storage devices 110, such as a hard drive and/or other computer readable media having data recorded thereon. The computer system 100 can further include one or more data retrieving device 118 for reading the data stored on the internal data storage devices 110.

[0182] The data retrieving device 118 may represent, for example, a floppy disk drive, a compact disk drive, a magnetic tape drive, or a modem capable of connection to a remote data storage system (e.g., via the internet) etc. In some embodiments, the internal data storage device 110 is a removable computer readable medium such as a floppy disk, a compact disk, a magnetic tape, etc. containing control logic and/or data recorded thereon. The computer system 100 may advantageously include or be programmed by appropriate software for reading the control logic and/or the data from the data storage component once inserted in the data retrieving device.

[0183] The computer system 100 includes a display 120 which is used to display output to a computer user. It should also be noted that the computer system 100 can be linked to other computer systems 125a-c in a network or wide area network to provide centralized access to the computer system 100. Software for accessing and processing the nucleotide or amino acid sequences of the invention can reside in main memory 115 during execution.

[0184] In some aspects, the computer system 100 may further comprise a sequence comparison algorithm for comparing a nucleic acid sequence of the invention. The algorithm and sequence(s) can be stored on a computer readable medium. A “sequence comparison algorithm” refers to one or more programs which are implemented (locally or remotely) on the computer system 100 to compare a nucleotide sequence with other nucleotide sequences and/or compounds stored within a data storage means. For example, the sequence comparison algorithm may compare the nucleotide sequences of an exemplary sequence, e.g., SEQ ID NO:1, SEQ ID NO:2, SEQ ID NO:4, SEQ ID NO:6, SEQ ID NO:8, SEQ ID NO:10, etc., including all nucleic acids disclosed in the SEQ ID listing, which include all even numbered SEQ ID NO:s from SEQ ID NO:2 through SEQ ID NO:1073, stored on a computer readable medium to reference sequences stored on a computer readable medium to identify homologies or structural motifs.

[0185] The parameters used with the above algorithms may be adapted depending on the sequence length and degree of homology studied. In some aspects, the parameters may be the default parameters used by the algorithms in the absence of instructions from the user.

[0186] FIG. 2 is a flow diagram illustrating one aspect of a process 200 for comparing a new nucleotide or protein sequence with a database of sequences in order to determine the homology levels between the new sequence and the sequences in the database. The database of sequences can be a private database stored within the computer system 100, or a public database such as GENBANK that is available through the Internet. The process 200 begins at a start state 201 and then moves to a state 202 wherein the new sequence to be compared is stored to a memory in a computer system 100. As discussed above, the memory could be any type of memory, including RAM or an internal storage device.

[0187] The process 200 then moves to a state 204 wherein a database of sequences is opened for analysis and comparison. The process 200 then moves to a state 206 wherein the first sequence stored in the database is read into a memory on the computer. A comparison is then performed at a state 210 to determine if the first sequence is the same as the second sequence. It is important to note that this step is not limited to performing an exact comparison between the new sequence and the first sequence in the database. Well-known methods are known to those of skill in the art for comparing two nucleotide or protein sequences, even if they are not identical. For example, gaps can be introduced into one sequence in order to raise the homology level between the two tested sequences. The parameters that control whether gaps or other features are introduced into a sequence during comparison are normally entered by the user of the computer system.

[0188] Once a comparison of the two sequences has been performed at the state 210, a determination is made at a decision state 210 whether the two sequences are the same. Of course, the term “same” is not limited to sequences that are absolutely identical. Sequences that are within the homology parameters entered by the user will be marked as “same” in the process 200. If a determination is made that the two sequences are the same, the process 200 moves to a state 214 wherein the name of the sequence from the database is displayed to the user. This state notifies the user that the sequence with the displayed name fulfills the homology constraints that were entered. Once the name of the stored sequence is displayed to the user, the process 200 moves to a decision state 218 wherein a determination is made whether more sequences exist in the database. If no more sequences exist in the database, then the process 200 terminates at an end state 220. However, if more sequences do exist in the database, then the process 200 moves to a state 224 wherein a pointer is moved to the next sequence in the database so that it can be compared to the new sequence. In this manner, the new sequence is aligned and compared with every sequence in the database.

[0189] It should be noted that if a determination had been made at the decision state 212 that the sequences were not homologous, then the process 200 would move immediately to the decision state 218 in order to determine if any other sequences were available in the database for comparison. Accordingly, one aspect of the invention is a computer system comprising a processor, a data storage device having stored thereon a nucleic acid sequence of the invention and a sequence comparer for conducting the comparison. The sequence comparer may indicate a homology level between the sequences compared or identify structural motifs, or it may identify structural motifs in sequences which are compared to these nucleic acid codes and polypeptide codes.

[0190] FIG. 3 is a flow diagram illustrating one embodiment of a process 250 in a computer for determining whether two sequences are homologous. The process 250 begins at a start state 252 and then moves to a state 254 wherein a first sequence to be compared is stored to a memory. The second sequence to be compared is then stored to a memory at a state 256. The process 250 then moves to a state 260 wherein the first character in the first sequence is read and then to a state 262 wherein the first character of the second sequence is read. It should be understood that if the sequence is a nucleotide sequence, then the character would normally be either A, T, C, G or U. If the sequence is a protein sequence, then it can be a single letter amino acid code so that the first and sequence sequences can be easily compared. A determination is then made at a decision state 264 whether the two characters are the same. If they are the same, then the process 250 moves to a state 268 wherein the next characters in the first and second sequences are read. A determination is then made whether the next characters are the same. If they are, then the process 250 continues this loop until two characters are not the same. If a determination is made that the next two characters are not the same, the process 250 moves to a decision state 274 to determine whether there are any more characters either sequence to read. If there are not any more characters to read, then the process 250 moves to a state 276 wherein the level of homology between the first and second sequences is displayed to the user. The level of homology is determined by calculating the proportion of characters between the sequences that were the same out of the total number of sequences in the first sequence. Thus, if every character in a first 100 nucleotide sequence aligned with a every character in a second sequence, the homology level would be 100%.

[0191] Alternatively, the computer program can compare a reference sequence to a sequence of the invention to determine whether the sequences differ at one or more positions. The program can record the length and identity of inserted, deleted or substituted nucleotides or amino acid residues with respect to the sequence of either the reference or the invention. The computer program may be a program which determines whether a reference sequence contains a single nucleotide polymorphism (SNP) with respect to a sequence of the invention, or, whether a sequence of the invention comprises a SNP of a known sequence. Thus, in some aspects, the computer program is a program which identifies SNPs. The method may be implemented by the computer systems described above and the method illustrated in FIG. 3. The method can be performed by reading a sequence of the invention and the reference sequences through the use of the computer program and identifying differences with the computer program.

[0192] In other aspects the computer based system comprises an identifier for identifying features within a nucleic acid or polypeptide of the invention. An “identifier” refers to one or more programs which identifies certain features within a nucleic acid sequence. For example, an identifier may comprise a program which identifies an open reading frame (ORF) in a nucleic acid sequence. FIG. 4 is a flow diagram illustrating one aspect of an identifier process 300 for detecting the presence of a feature in a sequence. The process 300 begins at a start state 302 and then moves to a state 304 wherein a first sequence that is to be checked for features is stored to a memory 115 in the computer system 100. The process 300 then moves to a state 306 wherein a database of sequence features is opened. Such a database would include a list of each feature's attributes along with the name of the feature. For example, a feature name could be “Initiation Codon” and the attribute would be “ATG”. Another example would be the feature name “TAATAA Box” and the feature attribute would be “TAATAA”. An example of such a database is produced by the University of Wisconsin Genetics Computer Group. Alternatively, the features may be structural polypeptide motifs such as alpha helices, beta sheets, or functional polypeptide motifs such as enzymatic active sites, helix-turn-helix motifs or other motifs known to those skilled in the art. Once the database of features is opened at the state 306, the process 300 moves to a state 308 wherein the first feature is read from the database. A comparison of the attribute of the first feature with the first sequence is then made at a state 310. A determination is then made at a decision state 316 whether the attribute of the feature was found in the first sequence. If the attribute was found, then the process 300 moves to a state 318 wherein the name of the found feature is displayed to the user. The process 300 then moves to a decision state 320 wherein a determination is made whether move features exist in the database. If no more features do exist, then the process 300 terminates at an end state 324. However, if more features do exist in the database, then the process 300 reads the next sequence feature at a state 326 and loops back to the state 310 wherein the attribute of the next feature is compared against the first sequence. If the feature attribute is not found in the first sequence at the decision state 316, the process 300 moves directly to the decision state 320 in order to determine if any more features exist in the database. Thus, in one aspect, the invention provides a computer program that identifies open reading frames (ORFs).

[0193] A polypeptide or nucleic acid sequence of the invention may be stored and manipulated in a variety of data processor programs in a variety of formats. For example, a sequence can be stored as text in a word processing file, such as MicrosoftWORD or WORDPERFECT or as an ASCII file in a variety of database programs familiar to those of skill in the art, such as DB2, SYBASE, or ORACLE. In addition, many computer programs and databases may be used as sequence comparison algorithms, identifiers, or sources of reference nucleotide sequences or polypeptide sequences to be compared to a nucleic acid sequence of the invention. The programs and databases used to practice the invention include, but are not limited to: MacPattern (EMBL), DiscoveryBase (Molecular Applications Group), GeneMine (Molecular Applications Group), Look (Molecular Applications Group), MacLook (Molecular Applications Group), BLAST and BLAST2 (NCBI), BLASTN and BLASTX (Altschul et al, J. Mol. Biol. 215: 403, 1990), FASTA (Pearson and Lipman, Proc. Natl. Acad. Sci. USA, 85: 2444, 1988), FASTDB (Brutlag et al. Comp. App. Biosci. 6:237-245, 1990), Catalyst (Molecular Simulations Inc.), Catalyst/SHAPE (Molecular Simulations Inc.), Cerius2.DBAccess (Molecular Simulations Inc.), HypoGen (Molecular Simulations Inc.), Insight II, (Molecular Simulations Inc.), Discover (Molecular Simulations Inc.), CHARMm (Molecular Simulations Inc.), Felix (Molecular Simulations Inc.), DelPhi, (Molecular Simulations Inc.), QuanteMM, (Molecular Simulations Inc.), Homology (Molecular Simulations Inc.), Modeler (Molecular Simulations Inc.), ISIS (Molecular Simulations Inc.), Quanta/Protein Design (Molecular Simulations Inc.), WebLab (Molecular Simulations Inc.), WebLab Diversity Explorer (Molecular Simulations Inc.), Gene Explorer (Molecular Simulations Inc.), SeqFold (Molecular Simulations Inc.), the MDL Available Chemicals Directory database, the MDL Drug Data Report data base, the Comprehensive Medicinal Chemistry database, Derwent's World Drug Index database, the BioByteMasterFile database, the Genbank database, and the Genseqn database. Many other programs and data bases would be apparent to one of skill in the art given the present disclosure.

[0194] Motifs which may be detected using the above programs include sequences encoding leucine zippers, helix-turn-helix motifs, glycosylation sites, ubiquitination sites, alpha helices, and beta sheets, signal sequences encoding signal peptides which direct the secretion of the encoded proteins, sequences implicated in transcription regulation such as homeoboxes, acidic stretches, enzymatic active sites, substrate binding sites, and enzymatic cleavage sites.

### Hybridization of Nucleic Acids

[0195] The invention provides isolated or recombinant nucleic acids that hybridize under stringent conditions to a sequence of the invention, e.g., a sequence as set forth in SEQ ID NO:1, SEQ ID NO:2, SEQ ID NO:4, SEQ ID NO:6, SEQ ID NO:8, SEQ ID NO:10, etc., including all nucleic acids disclosed in the SEQ ID listing, which include all even numbered SEQ ID NO:s from SEQ ID NO:2 through SEQ ID NO:1073, or a nucleic acid that encodes a polypeptide of the invention, e.g., SEQ ID NO:3, SEQ ID NO:5, SEQ ID NO:7, SEQ ID NO:9, SEQ ID NO:11, etc., and all polypeptides disclosed in the SEQ ID listing, which include all odd numbered SEQ ID NO:s from SEQ ID NO:3 through SEQ ID NO:1073. The stringent conditions can be highly stringent conditions, medium stringent conditions, low stringent conditions, including the high and reduced stringency conditions described herein. In alternative embodiments, nucleic acids of the invention as defined by their ability to hybridize under stringent conditions can be between about five residues and the full length of the molecule, e.g., an exemplary nucleic acid of the invention. For example, they can be at least 5, 10, 15, 20, 25, 30, 35, 40, 50, 55, 60, 65, 70, 75, 80, 90, 100, 150, 200, 250, 300, 350, 400 residues in length. Nucleic acids shorter than full length are also included. These nucleic acids are useful as, e.g., hybridization probes, labeling probes, PCR oligonucleotide probes, iRNA (single or double stranded), antisense or sequences encoding antibody binding peptides (epitopes), motifs, active sites and the like.

[0196] In one aspect, nucleic acids of the invention are defined by their ability to hybridize under high stringency comprises conditions of about 50% formamide at about 37° C. to 42° C. In one aspect, nucleic acids of the invention are defined by their ability to hybridize under reduced stringency comprising conditions in about 35% to 25% formamide at about 30° C. to 35° C. Alternatively, nucleic acids of the invention are defined by their ability to hybridize under high stringency comprising conditions at 42° C. in 50% formamide, 5×SSPE, 0.3% SDS, and a repetitive sequence blocking nucleic acid, such as cot-1 or salmon sperm DNA (e.g., 200 n/ml sheared and denatured salmon sperm DNA). In one aspect, nucleic acids of the invention are defined by their ability to hybridize under reduced stringency conditions comprising 35% formamide at a reduced temperature of 35° C.

[0197] Following hybridization, the filter may be washed with 6×SSC, 0.5% SDS at 50° C. These conditions are considered to be “moderate” conditions above 25% formamide and “low” conditions below 25% formamide. A specific example of “moderate” hybridization conditions is when the above hybridization is conducted at 30% formamide. A specific example of “low stringency” hybridization conditions is when the above hybridization is conducted at 10% formamide.

[0198] The temperature range corresponding to a particular level of stringency can be further narrowed by calculating the purine to pyrimidine ratio of the nucleic acid of interest and adjusting the temperature accordingly. Nucleic acids of the invention are also defined by their ability to hybridize under high, medium, and low stringency conditions as set forth in Ausubel and Sambrook. Variations on the above ranges and conditions are well known in the art. Hybridization conditions are discussed further, below.

### Oligonucleotides Probes and Methods for Using Them

[0199] The invention also provides nucleic acid probes for identifying nucleic acids encoding polypeptides (e.g., enzymes) of the invention, and polypeptides having the same activity as a polypeptide of the invention. In one aspect, the probe comprises at least 10 consecutive bases of a sequence of the invention, e.g., the exemplary SEQ ID NO:1, SEQ ID NO:2, SEQ ID NO:4, SEQ ID NO:6, SEQ ID NO:8, SEQ ID NO:10, etc., including all nucleic acids disclosed in the SEQ ID listing, which include all even numbered SEQ ID NO:s from SEQ ID NO:2 through SEQ ID NO:1073. Alternatively, a probe of the invention can be at least about 5, 6, 7, 8, 9, 10, 11, 12, 13, 14, 15, 16, 17, 18, 19, 20, 21, 22, 23, 24, 25, 30, 35, 40, 50, 55, 60, 65, 70, 75, 80, 90, 100, 150, about 10 to 50, about 20 to 60 about 30 to 70, consecutive bases of a sequence as set forth in a sequence of the invention. The probes identify a nucleic acid by binding or hybridization. The probes can be used in arrays of the invention, see discussion below, including, e.g., capillary arrays. The probes of the invention can also be used to isolate other nucleic acids or polypeptides.

[0200] The probes of the invention can be used to determine whether a biological sample, such as a soil sample, contains an organism having a nucleic acid sequence of the invention or an organism from which the nucleic acid was obtained. In such procedures, a biological sample potentially harboring the organism from which the nucleic acid was isolated is obtained and nucleic acids are obtained from the sample. The nucleic acids are contacted with the probe under conditions which permit the probe to specifically hybridize to any complementary sequences present in the sample. Where necessary, conditions which permit the probe to specifically hybridize to complementary sequences may be determined by placing the probe in contact with complementary sequences from samples known to contain the complementary sequence, as well as control sequences which do not contain the complementary sequence. Hybridization conditions, such as the salt concentration of the hybridization buffer, the formamide concentration of the hybridization buffer, or the hybridization temperature, may be varied to identify conditions which allow the probe to hybridize specifically to complementary nucleic acids (see discussion on specific hybridization conditions).

[0201] If the sample contains the organism from which the nucleic acid was isolated, specific hybridization of the probe is then detected. Hybridization may be detected by labeling the probe with a detectable agent such as a radioactive isotope, a fluorescent dye or an enzyme capable of catalyzing the formation of a detectable product. Many methods for using the labeled probes to detect the presence of complementary nucleic acids in a sample are familiar to those skilled in the art. These include Southern Blots, Northern Blots, colony hybridization procedures, and dot blots. Protocols for each of these procedures are provided in Ausubel and Sambrook.

[0202] Alternatively, more than one probe (at least one of which is capable of specifically hybridizing to any complementary sequences which are present in the nucleic acid sample), may be used in an amplification reaction to determine whether the sample contains an organism containing a nucleic acid sequence of the invention (e.g., an organism from which the nucleic acid was isolated). In one aspect, the probes comprise oligonucleotides. In one aspect, the amplification reaction may comprise a PCR reaction. PCR protocols are described in Ausubel and Sambrook (see discussion on amplification reactions). In such procedures, the nucleic acids in the sample are contacted with the probes, the amplification reaction is performed, and any resulting amplification product is detected. The amplification product may be detected by performing gel electrophoresis on the reaction products and staining the gel with an intercalator such as ethidium bromide. Alternatively, one or more of the probes may be labeled with a radioactive isotope and the presence of a radioactive amplification product may be detected by autoradiography after gel electrophoresis.

[0203] Probes derived from sequences near the 3′ or 5′ ends of a nucleic acid sequence of the invention can also be used in chromosome walking procedures to identify clones containing additional, e.g., genomic sequences. Such methods allow the isolation of genes which encode additional proteins of interest from the host organism.

[0204] In one aspect, nucleic acid sequences of the invention are used as probes to identify and isolate related nucleic acids. In some aspects, the so-identified related nucleic acids may be cDNAs or genomic DNAs from organisms other than the one from which the nucleic acid of the invention was first isolated. In such procedures, a nucleic acid sample is contacted with the probe under conditions which permit the probe to specifically hybridize to related sequences. Hybridization of the probe to nucleic acids from the related organism is then detected using any of the methods described above.

[0205] In nucleic acid hybridization reactions, the conditions used to achieve a particular level of stringency will vary, depending on the nature of the nucleic acids being hybridized. For example, the length, degree of complementarity, nucleotide sequence composition (e.g., GC v. AT content), and nucleic acid type (e.g., RNA v. DNA) of the hybridizing regions of the nucleic acids can be considered in selecting hybridization conditions. An additional consideration is whether one of the nucleic acids is immobilized, for example, on a filter. Hybridization may be carried out under conditions of low stringency, moderate stringency or high stringency. As an example of nucleic acid hybridization, a polymer membrane containing immobilized denatured nucleic acids is first prehybridized for 30 minutes at 45° C. in a solution consisting of 0.9 M NaCl, 50 mM NaH2PO4, pH 7.0, 5.0 mM Na2EDTA, 0.5% SDS, 10×Denhardt's, and 0.5 mg/ml polyriboadenylic acid. Approximately 2×107 cpm (specific activity 4−9×108 cpm/ug) of ³²P end-labeled oligonucleotide probe are then added to the solution. After 12-16 hours of incubation, the membrane is washed for 30 minutes at room temperature (RT) in 1×SET (150 mM NaCl, 20 mM Tris hydrochloride, pH 7.8, 1 mM Na2EDTA) containing 0.5% SDS, followed by a 30 minute wash in fresh 1×SET at Tm−10° C. for the oligonucleotide probe. The membrane is then exposed to auto-radiographic film for detection of hybridization signals.

[0206] By varying the stringency of the hybridization conditions used to identify nucleic acids, such as cDNAs or genomic DNAs, which hybridize to the detectable probe, nucleic acids having different levels of homology to the probe can be identified and isolated. Stringency may be varied by conducting the hybridization at varying temperatures below the melting temperatures of the probes. The melting temperature, Tm, is the temperature (under defined ionic strength and pH) at which 50% of the target sequence hybridizes to a perfectly complementary probe. Very stringent conditions are selected to be equal to or about 5° C. lower than the Tm for a particular probe. The melting temperature of the probe may be calculated using the following exemplary formulas. For probes between 14 and 70 nucleotides in length the melting temperature (Tm) is calculated using the formula: Tm=81.5+16.6(log [Na+])+0.41(fraction G+C)−(600/N) where N is the length of the probe. If the hybridization is carried out in a solution containing formamide, the melting temperature may be calculated using the equation: Tm=81.5+16.6(log [Na+])+0.41(fraction G+C)−(0.63% formamide)-(600/N) where N is the length of the probe. Prehybridization may be carried out in 6×SSC, 5×Denhardt's reagent, 0.5% SDS, 100 μg denatured fragmented salmon sperm DNA or 6×SSC, 5×Denhardt's reagent, 0.5% SDS, 100 μg denatured fragmented salmon sperm DNA, 50% formamide. Formulas for SSC and Denhardt's and other solutions are listed, e.g., in Sambrook.

[0207] Hybridization is conducted by adding the detectable probe to the prehybridization solutions listed above. Where the probe comprises double stranded DNA, it is denatured before addition to the hybridization solution. The filter is contacted with the hybridization solution for a sufficient period of time to allow the probe to hybridize to cDNAs or genomic DNAs containing sequences complementary thereto or homologous thereto. For probes over 200 nucleotides in length, the hybridization may be carried out at 15-25° C. below the Tm. For shorter probes, such as oligonucleotide probes, the hybridization may be conducted at 5-10° C. below the Tm. In one aspect, hybridizations in 6×SSC are conducted at approximately 68° C. In one aspect, hybridizations in 50% formamide containing solutions are conducted at approximately 42° C. All of the foregoing hybridizations would be considered to be under conditions of high stringency.

[0208] Following hybridization, the filter is washed to remove any non-specifically bound detectable probe. The stringency used to wash the filters can also be varied depending on the nature of the nucleic acids being hybridized, the length of the nucleic acids being hybridized, the degree of complementarity, the nucleotide sequence composition (e.g., GC v. AT content), and the nucleic acid type (e.g., RNA v. DNA). Examples of progressively higher stringency condition washes are as follows: 2×SSC, 0.1% SDS at room temperature for 15 minutes (low stringency); 0.1×SSC, 0.5% SDS at room temperature for 30 minutes to 1 hour (moderate stringency); 0.1×SSC, 0.5% SDS for 15 to 30 minutes at between the hybridization temperature and 68° C. (high stringency); and 0.15M NaCl for 15 minutes at 72° C. (very high stringency). A final low stringency wash can be conducted in 0.1×SSC at room temperature. The examples above are merely illustrative of one set of conditions that can be used to wash filters. One of skill in the art would know that there are numerous recipes for different stringency washes.

[0209] Nucleic acids which have hybridized to the probe can be identified by autoradiography or other conventional techniques. The above procedure may be modified to identify nucleic acids having decreasing levels of homology to the probe sequence. For example, to obtain nucleic acids of decreasing homology to the detectable probe, less stringent conditions may be used. For example, the hybridization temperature may be decreased in increments of 5° C. from 68° C. to 42° C. in a hybridization buffer having a Na+ concentration of approximately 1M. Following hybridization, the filter may be washed with 2×SSC, 0.5% SDS at the temperature of hybridization. These conditions are considered to be “moderate” conditions above 50° C. and “low” conditions below 50° C. An example of “moderate” hybridization conditions is when the above hybridization is conducted at 55° C. An example of “low stringency” hybridization conditions is when the above hybridization is conducted at 45° C.

[0210] Alternatively, the hybridization may be carried out in buffers, such as 6×SSC, containing formamide at a temperature of 42° C. In this case, the concentration of formamide in the hybridization buffer may be reduced in 5% increments from 50% to 0% to identify clones having decreasing levels of homology to the probe. Following hybridization, the filter may be washed with 6×SSC, 0.5% SDS at 50° C. These conditions are considered to be “moderate” conditions above 25% formamide and “low” conditions below 25% formamide. A specific example of “moderate” hybridization conditions is when the above hybridization is conducted at 30% formamide. A specific example of “low stringency” hybridization conditions is when the above hybridization is conducted at 10% formamide.

[0211] These probes and methods of the invention can be used to isolate nucleic acids having a sequence with at least about 99%, 98%, 97%, at least 95%, at least 90%, at least 85%, at least 80%, at least 75%, at least 70%, at least 65%, at least 60%, at least 55%, or at least 50% homology to a nucleic acid sequence of the invention comprising at least about 10, 15, 20, 25, 30, 35, 40, 50, 75, 100, 150, 200, 250, 300, 350, 400, or 500 consecutive bases thereof, and the sequences complementary thereto. Homology may be measured using an alignment algorithm, as discussed herein. For example, the homologous polynucleotides may have a coding sequence which is a naturally occurring allelic variant of one of the coding sequences described herein. Such allelic variants may have a substitution, deletion or addition of one or more nucleotides when compared to nucleic acids of the invention.

[0212] Additionally, the probes and methods of the invention may be used to isolate nucleic acids which encode polypeptides having at least about 99%, at least 95%, at least 90%, at least 85%, at least 80%, at least 75%, at least 70%, at least 65%, at least 60%, at least 55%, or at least 50% sequence identity (homology) to a polypeptide of the invention comprising at least 5, 10, 15, 20, 25, 30, 35, 40, 50, 75, 100, or 150 consecutive amino acids thereof as determined using a sequence alignment algorithm (e.g., such as the FASTA version 3.0t78 algorithm with the default parameters, or a BLAST 2.2.2 program with exemplary settings as set forth herein).

### Inhibiting Expression of Polypeptides

[0213] The invention further provides for nucleic acids complementary to (e.g., antisense sequences to) the nucleic acids of the invention, e.g., polypeptide-encoding nucleic acids. Antisense sequences are capable of inhibiting the transport, splicing or transcription of polypeptide-encoding genes. The inhibition can be effected through the targeting of genomic DNA or messenger RNA. The transcription or function of targeted nucleic acid can be inhibited, for example, by hybridization and/or cleavage. One particularly useful set of inhibitors provided by the present invention includes oligonucleotides which are able to either bind polypeptide-coding gene or message, in either case preventing or inhibiting the production or function of the polypeptide. The association can be though sequence-specific hybridization. Another useful class of inhibitors includes oligonucleotides which cause inactivation or cleavage of polypeptide message. The oligonucleotide can have activity which causes such cleavage, such as ribozymes. The oligonucleotide can be chemically modified or conjugated to an enzyme or composition capable of cleaving the complementary nucleic acid. One may screen a pool of many different such oligonucleotides for those with the desired activity. Inhibition of polypeptide (e.g, enzyme) expression can have a variety of industrial applications. These compositions also can be expressed by the plant (e.g., a transgenic plant) or another organism (e.g., a bacterium or other microorganism transformed with an enzyme gene of the invention). The compositions of the invention for the inhibition of polypeptide (e.g., enzyme) expression (e.g., antisense, iRNA, ribozymes, antibodies) can be used as pharmaceutical compositions.

[0214] Antisense Oligonucleotides

[0215] The invention provides antisense oligonucleotides capable of binding message which can inhibit polypeptide activity by targeting mRNA. Strategies for designing antisense oligonucleotides are well described in the scientific and patent literature, and the skilled artisan can design such oligonucleotides using the novel reagents of the invention. For example, gene walking/RNA mapping protocols to screen for effective antisense oligonucleotides are well known in the art, see, e.g., Ho (2000) Methods Enzymol. 314:168-183, describing an RNA mapping assay, which is based on standard molecular techniques to provide an easy and reliable method for potent antisense sequence selection. See also Smith (2000) Eur. J. Pharm. Sci. 11:191-198.

[0216] Naturally occurring nucleic acids are used as antisense oligonucleotides. The antisense oligonucleotides can be of any length; for example, in alternative aspects, the antisense oligonucleotides are between about 5 to 100, about 10 to 80, about 15 to 60, about 18 to 40. The optimal length can be determined by routine screening. The antisense oligonucleotides can be present at any concentration. The optimal concentration can be determined by routine screening. A wide variety of synthetic, non-naturally occurring nucleotide and nucleic acid analogues are known which can address this potential problem. For example, peptide nucleic acids (PNAs) containing non-ionic backbones, such as N-(2-aminoethyl)glycine units can be used. Antisense oligonucleotides having phosphorothioate linkages can also be used, as described in WO 97/03211; WO 96/39154; Mata (1997) Toxicol Appl Pharmacol 144:189-197; Antisense Therapeutics, ed. Agrawal (Humana Press, Totowa, N.J., 1996). Antisense oligonucleotides having synthetic DNA backbone analogues provided by the invention can also include phosphoro-dithioate, methylphosphonate, phosphoramidate, alkyl phosphotriester, sulfamate, 3′-thioacetal, methylene(methylimino), 3′-N-carbamate, and morpholino carbamate nucleic acids, as described above.

[0217] Combinatorial chemistry methodology can be used to create vast numbers of oligonucleotides that can be rapidly screened for specific oligonucleotides that have appropriate binding affinities and specificities toward any target, such as the sense and antisense enzyme sequences of the invention (see, e.g., Gold (1995) J. of Biol. Chem. 270:13581-13584).

[0218] Inhibitory Ribozymes

[0219] The invention provides for with ribozymes capable of binding polypeptide-coding message which can inhibit polypeptide activity by targeting mRNA. Strategies for designing ribozymes and selecting the polypeptide-specific antisense sequence for targeting are well described in the scientific and patent literature, and the skilled artisan can design such ribozymes using the novel reagents of the invention. Ribozymes act by binding to a target RNA through the target RNA binding portion of a ribozyme which is held in close proximity to an enzymatic portion of the RNA that cleaves the target RNA. Thus, the ribozyme recognizes and binds a target RNA through complementary base-pairing, and once bound to the correct site, acts enzymatically to cleave and inactivate the target RNA. Cleavage of a target RNA in such a manner will destroy its ability to direct synthesis of an encoded protein if the cleavage occurs in the coding sequence. After a ribozyme has bound and cleaved its RNA target, it is typically released from that RNA and so can bind and cleave new targets repeatedly.

[0220] In some circumstances, the enzymatic nature of a ribozyme can be advantageous over other technologies, such as antisense technology (where a nucleic acid molecule simply binds to a nucleic acid target to block its transcription, translation or association with another molecule) as the effective concentration of ribozyme necessary to effect a therapeutic treatment can be lower than that of an antisense oligonucleotide. This potential advantage reflects the ability of the ribozyme to act enzymatically. Thus, a single ribozyme molecule is able to cleave many molecules of target RNA. In addition, a ribozyme is typically a highly specific inhibitor, with the specificity of inhibition depending not only on the base pairing mechanism of binding, but also on the mechanism by which the molecule inhibits the expression of the RNA to which it binds. That is, the inhibition is caused by cleavage of the RNA target and so specificity is defined as the ratio of the rate of cleavage of the targeted RNA over the rate of cleavage of non-targeted RNA. This cleavage mechanism is dependent upon factors additional to those involved in base pairing. Thus, the specificity of action of a ribozyme can be greater than that of antisense oligonucleotide binding the same RNA site.

[0221] The enzymatic ribozyme RNA molecule can be formed in a hammerhead motif, but may also be formed in the motif of a hairpin, hepatitis delta virus, group I intron or RNaseP-like RNA (in association with an RNA guide sequence). Examples of such hammerhead motifs are described by Rossi (1992) Aids Research and Human Retroviruses 8:183; hairpin motifs by Hampel (1989) Biochemistry 28:4929, and Hampel (1990) Nuc. Acids Res. 18:299; the hepatitis delta virus motif by Perrotta (1992) Biochemistry 31:16; the RNaseP motif by Guerrier-Takada (1983) Cell 35:849; and the group I intron by Cech U.S. Pat. No. 4,987,071. The recitation of these specific motifs is not intended to be limiting; those skilled in the art will recognize that an enzymatic RNA molecule of this invention has a specific substrate binding site complementary to one or more of the target gene RNA regions, and has nucleotide sequence within or surrounding that substrate binding site which imparts an RNA cleaving activity to the molecule.

[0222] RNA Interference (RNAi)

[0223] In one aspect, the invention provides an RNA inhibitory molecule, a so-called “RNAi” molecule, comprising an polypeptide-encoding sequence of the invention. The RNAi molecule comprises a double-stranded RNA (dsRNA) molecule. The RNAi can inhibit expression of polypeptide-coding gene, e.g., an enzyme-encoding gene. In one aspect, the RNAi is about 15, 16, 17, 18, 19, 20, 21, 22, 23, 24, 25 or more duplex nucleotides in length. While the invention is not limited by any particular mechanism of action, the RNAi can enter a cell and cause the degradation of a single-stranded RNA (ssRNA) of similar or identical sequences, including endogenous mRNAs. When a cell is exposed to double-stranded RNA (dsRNA), mRNA from the homologous gene is selectively degraded by a process called RNA interference (RNAi). A possible basic mechanism behind RNAi is the breaking of a double-stranded RNA (dsRNA) matching a specific gene sequence into short pieces called short interfering RNA, which trigger the degradation of mRNA that matches its sequence. In one aspect, the RNAi's of the invention are used in gene-silencing therapeutics, see, e.g., Shuey (2002) Drug Discov. Today 7:1040-1046. In one aspect, the invention provides methods to selectively degrade RNA using the RNAi's of the invention. The process may be practiced in vitro, ex vivo or in vivo. In one aspect, the RNAi molecules of the invention can be used to generate a loss-of-function mutation in a cell, an organ or an animal. Methods for making and using RNAi molecules for selectively degrade RNA are well known in the art, see, e.g., U.S. Pat. Nos. 6,506,559; 6,511,824; 6,515,109; 6,489,127.

### Modification of Nucleic Acids

[0224] The invention provides methods of generating variants of the nucleic acids of the invention, e.g., those encoding a polypeptide. These methods can be repeated or used in various combinations to generate enzymes having an altered or different activity or an altered or different stability from that of an enzyme encoded by the template nucleic acid. These methods also can be repeated or used in various combinations, e.g., to generate variations in gene/message expression, message translation or message stability. In another aspect, the genetic composition of a cell is altered by, e.g., modification of a homologous gene ex vivo, followed by its reinsertion into the cell.

[0225] A nucleic acid of the invention can be altered by any means. For example, random or stochastic methods, or, non-stochastic, or “directed evolution,” methods.

[0226] Methods for random mutation of genes are well known in the art, see, e.g., U.S. Pat. No. 5,830,696. For example, mutagens can be used to randomly mutate a gene. Mutagens include, e.g., ultraviolet light or gamma irradiation, or a chemical mutagen, e.g., mitomycin, nitrous acid, photoactivated psoralens, alone or in combination, to induce DNA breaks amenable to repair by recombination. Other chemical mutagens include, for example, sodium bisulfite, nitrous acid, hydroxylamine, hydrazine or formic acid. Other mutagens are analogues of nucleotide precursors, e.g., nitrosoguanidine, 5-bromouracil, 2-aminopurine, or acridine. These agents can be added to a PCR reaction in place of the nucleotide precursor thereby mutating the sequence. Intercalating agents such as proflavine, acriflavine, quinacrine and the like can also be used.

[0227] Any technique in molecular biology can be used, e.g., random PCR mutagenesis, see, e.g., Rice (1992) Proc. Natl. Acad. Sci. USA 89:5467-5471; or, combinatorial multiple cassette mutagenesis, see, e.g., Crameri (1995) Biotechniques 18:194-196. Alternatively, nucleic acids, e.g., genes, can be reassembled after random, or “stochastic,” fragmentation, see, e.g., U.S. Pat. Nos. 6,291,242; 6,287,862; 6,287,861; 5,955,358; 5,830,721; 5,824,514; 5,811,238; 5,605,793. In alternative aspects, modifications, additions or deletions are introduced by error-prone PCR, shuffling, oligonucleotide-directed mutagenesis, assembly PCR, sexual PCR mutagenesis, in vivo mutagenesis, cassette mutagenesis, recursive ensemble mutagenesis, exponential ensemble mutagenesis, site-specific mutagenesis, gene reassembly, gene site saturated mutagenesis (GSSM), synthetic ligation reassembly (SLR), recombination, recursive sequence recombination, phosphothioate-modified DNA mutagenesis, uracil-containing template mutagenesis, gapped duplex mutagenesis, point mismatch repair mutagenesis, repair-deficient host strain mutagenesis, chemical mutagenesis, radiogenic mutagenesis, deletion mutagenesis, restriction-selection mutagenesis, restriction-purification mutagenesis, artificial gene synthesis, ensemble mutagenesis, chimeric nucleic acid multimer creation, and/or a combination of these and other methods.

[0228] The following publications describe a variety of recursive recombination procedures and/or methods which can be incorporated into the methods of the invention: Stemmer (1999) “Molecular breeding of viruses for targeting and other clinical properties” Tumor Targeting 4:1-4; Ness (1999) Nature Biotechnology 17:893-896; Chang (1999) “Evolution of a cytokine using DNA family shuffling” Nature Biotechnology 17:793-797; Minshull (1999) “Protein evolution by molecular breeding” Current Opinion in Chemical Biology 3:284-290; Christians (1999) “Directed evolution of thymidine kinase for AZT phosphorylation using DNA family shuffling” Nature Biotechnology 17:259-264; Crameri (1998) “DNA shuffling of a family of genes from diverse species accelerates directed evolution” Nature 391:288-291; Crameri (1997) “Molecular evolution of an arsenate detoxification pathway by DNA shuffling,” Nature Biotechnology 15:436-438; Zhang (1997) “Directed evolution of an effective fucosidase from a galactosidase by DNA shuffling and screening” Proc. Natl. Acad. Sci. USA 94:4504-4509; Patten et al. (1997) “Applications of DNA Shuffling to Pharmaceuticals and Vaccines” Current Opinion in Biotechnology 8:724-733; Crameri et al. (1996) “Construction and evolution of antibody-phage libraries by DNA shuffling” Nature Medicine 2:100-103; Crameri et al. (1996) “Improved green fluorescent protein by molecular evolution using DNA shuffling” Nature Biotechnology 14:315-319; Gates et al. (1996) “Affinity selective isolation of ligands from peptide libraries through display on a lac repressor headpiece dimer” Journal of Molecular Biology 255:373-386; Stemmer (1996) “Sexual PCR and Assembly PCR” In: The Encyclopedia of Molecular Biology. VCH Publishers, New York. pp. 447-457; Crameri and Stemmer (1995) “Combinatorial multiple cassette mutagenesis creates all the permutations of mutant and wildtype cassettes” BioTechniques 18:194-195; Stemmer et al. (1995) “Single-step assembly of a gene and entire plasmid form large numbers of oligodeoxyribonucleotides” Gene, 164:49-53; Stemmer (1995) “The Evolution of Molecular Computation” Science 270: 1510; Stemmer (1995) “Searching Sequence Space” Bio/Technology 13:549-553; Stemmer (1994) “Rapid evolution of a protein in vitro by DNA shuffling” Nature 370:389-391; and Stemmer (1994) “DNA shuffling by random fragmentation and reassembly: In vitro recombination for molecular evolution.” Proc. Natl. Acad. Sci. USA 91:10747-10751. Mutational methods of generating diversity include, for example, site-directed mutagenesis (Ling et al. (1997) “Approaches to DNA mutagenesis: an overview” Anal Biochem. 254(2): 157-178; Dale et al. (1996) “Oligonucleotide-directed random mutagenesis using the phosphorothioate method” Methods Mol. Biol. 57:369-374; Smith (1985) “In vitro mutagenesis” Ann. Rev. Genet. 19:423-462; Botstein & Shortle (1985) “Strategies and applications of in vitro mutagenesis” Science 229:1193-1201; Carter (1986) “Site-directed mutagenesis” Biochem. J. 237:1-7; and Kunkel (1987) “The efficiency of oligonucleotide directed mutagenesis” in Nucleic Acids & Molecular Biology (Eckstein, F. and Lilley, D. M. J. eds., Springer Verlag, Berlin)); mutagenesis using uracil containing templates (Kunkel (1985) “Rapid and efficient site-specific mutagenesis without phenotypic selection” Proc. Natl. Acad. Sci. USA 82:488-492; Kunkel et al. (1987) “Rapid and efficient site-specific mutagenesis without phenotypic selection” Methods in Enzymol. 154, 367-382; and Bass et al. (1988) “Mutant Trp repressors with new DNA-binding specificities” Science 242:240-245); oligonucleotide-directed mutagenesis (Methods in Enzymol. 100: 468-500 (1983); Methods in Enzymol. 154: 329-350 (1987); Zoller & Smith (1982) “Oligonucleotide-directed mutagenesis using M13-derived vectors: an efficient and general procedure for the production of point mutations in any DNA fragment” Nucleic Acids Res. 10:6487-6500; Zoller & Smith (1983) “Oligonucleotide-directed mutagenesis of DNA fragments cloned into M13 vectors” Methods in Enzymol. 100:468-500; and Zoller & Smith (1987) “Oligonucleotide-directed mutagenesis: a simple method using two oligonucleotide primers and a single-stranded DNA template” Methods in Enzymol. 154:329-350); phosphorothioate-modified DNA mutagenesis (Taylor et al. (1985) “The use of phosphorothioate-modified DNA in restriction enzyme reactions to prepare nicked DNA” Nucl. Acids Res. 13: 8749-8764; Taylor et al. (1985) “The rapid generation of oligonucleotide-directed mutations at high frequency using phosphorothioate-modified DNA” Nucl. Acids Res. 13: 8765-8787 (1985); Nakamaye (1986) “Inhibition of restriction endonuclease Nci I cleavage by phosphorothioate groups and its application to oligonucleotide-directed mutagenesis” Nucl. Acids Res. 14: 9679-9698; Sayers et al. (1988) “Y-T Exonucleases in phosphorothioate-based oligonucleotide-directed mutagenesis” Nucl. Acids Res. 16:791-802; and Sayers et al. (1988) “Strand specific cleavage of phosphorothioate-containing DNA by reaction with restriction endonucleases in the presence of ethidium bromide” Nucl. Acids Res. 16: 803-814); mutagenesis using gapped duplex DNA (Kramer et al. (1984) “The gapped duplex DNA approach to oligonucleotide-directed mutation construction” Nucl. Acids Res. 12: 9441-9456; Kramer & Fritz (1987) Methods in Enzymol. “Oligonucleotide-directed construction of mutations via gapped duplex DNA” 154:350-367; Kramer et al. (1988) “Improved enzymatic in vitro reactions in the gapped duplex DNA approach to oligonucleotide-directed construction of mutations” Nucl. Acids Res. 16: 7207; and Fritz et al. (1988) “Oligonucleotide-directed construction of mutations: a gapped duplex DNA procedure without enzymatic reactions in vitro” Nucl. Acids Res. 16: 6987-6999).

[0229] Additional protocols used in the methods of the invention include point mismatch repair (Kramer (1984) “Point Mismatch Repair” Cell 38:879-887), mutagenesis using repair-deficient host strains (Carter et al. (1985) “Improved oligonucleotide site-directed mutagenesis using M13 vectors” Nucl. Acids Res. 13: 4431-4443; and Carter (1987) “Improved oligonucleotide-directed mutagenesis using M13 vectors” Methods in Enzymol. 154: 382-403), deletion mutagenesis (Eghtedarzadeh (1986) “Use of oligonucleotides to generate large deletions” Nucl. Acids Res. 14: 5115), restriction-selection and restriction-selection and restriction-purification (Wells et al. (1986) “Importance of hydrogen-bond formation in stabilizing the transition state of subtilisin” Phil. Trans. R. Soc. Lond. A 317: 415-423), mutagenesis by total gene synthesis (Nambiar et al. (1984) “Total synthesis and cloning of a gene coding for the ribonuclease S protein” Science 223: 1299-1301; Sakamar and Khorana (1988) “Total synthesis and expression of a gene for the a-subunit of bovine rod outer segment guanine nucleotide-binding protein (transducin)” Nucl. Acids Res. 14: 6361-6372; Wells et al. (1985) “Cassette mutagenesis: an efficient method for generation of multiple mutations at defined sites” Gene 34:315-323; and Grundstrom et al. (1985) “Oligonucleotide-directed mutagenesis by microscale ‘shot-gun’ gene synthesis” Nucl. Acids Res. 13: 3305-3316), double-strand break repair (Mandecki (1986); Arnold (1993) “Protein engineering for unusual environments” Current Opinion in Biotechnology 4:450-455. “Oligonucleotide-directed double-strand break repair in plasmids of Escherichia coli: a method for site-specific mutagenesis” Proc. Natl. Acad. Sci. USA, 83:7177-7181). Additional details on many of the above methods can be found in Methods in Enzymology Volume 154, which also describes useful controls for trouble-shooting problems with various mutagenesis methods.

[0230] See also U.S. Pat. No. 5,605,793 to Stemmer (Feb. 25, 1997), “Methods for In Vitro Recombination;” U.S. Pat. No. 5,811,238 to Stemmer et al. (Sep. 22, 1998) “Methods for Generating Polynucleotides having Desired Characteristics by Iterative Selection and Recombination;” U.S. Pat. No. 5,830,721 to Stemmer et al. (Nov. 3, 1998), “DNA Mutagenesis by Random Fragmentation and Reassembly;” U.S. Pat. No. 5,834,252 to Stemmer, et al. (Nov. 10, 1998) “End-Complementary Polymerase Reaction;” U.S. Pat. No. 5,837,458 to Minshull, et al. (Nov. 17, 1998), “Methods and Compositions for Cellular and Metabolic Engineering;” WO 95/22625, Stemmer and Crameri, “Mutagenesis by Random Fragmentation and Reassembly;” WO 96/33207 by Stemmer and Lipschutz “End Complementary Polymerase Chain Reaction;” WO 97/20078 by Stemmer and Crameri “Methods for Generating Polynucleotides having Desired Characteristics by Iterative Selection and Recombination;” WO 97/35966 by Minshull and Stemmer, “Methods and Compositions for Cellular and Metabolic Engineering;” WO 99/41402 by Punnonen et al. “Targeting of Genetic Vaccine Vectors;” WO 99/41383 by Punnonen et al. “Antigen Library Immunization;” WO 99/41369 by Punnonen et al. “Genetic Vaccine Vector Engineering;” WO 99/41368 by Punnonen et al. “Optimization of Immunomodulatory Properties of Genetic Vaccines;” EP 752008 by Stemmer and Crameri, “DNA Mutagenesis by Random Fragmentation and Reassembly;” EP 0932670 by Stemmer “Evolving Cellular DNA Uptake by Recursive Sequence Recombination;” WO 99/23107 by Stemmer et al., “Modification of Virus Tropism and Host Range by Viral Genome Shuffling;” WO 99/21979 by Apt et al., “Human Papillomavirus Vectors;” WO 98/31837 by del Cardayre et al. “Evolution of Whole Cells and Organisms by Recursive Sequence Recombination;” WO 98/27230 by Patten and Stemmer, “Methods and Compositions for Polypeptide Engineering;” WO 98/27230 by Stemmer et al., “Methods for Optimization of Gene Therapy by Recursive Sequence Shuffling and Selection,” WO 00/00632, “Methods for Generating Highly Diverse Libraries,” WO 00/09679, “Methods for Obtaining in Vitro Recombined Polynucleotide Sequence Banks and Resulting Sequences,” WO 98/42832 by Arnold et al., “Recombination of Polynucleotide Sequences Using Random or Defined Primers,” WO 99/29902 by Arnold et al., “Method for Creating Polynucleotide and Polypeptide Sequences,” WO 98/41653 by Vind, “An in Vitro Method for Construction of a DNA Library,” WO 98/41622 by Borchert et al., “Method for Constructing a Library Using DNA Shuffling,” and WO 98/42727 by Pati and Zarling, “Sequence Alterations using Homologous Recombination.”

[0231] Certain U.S. applications provide additional details regarding various diversity generating methods, including “SHUFFLING OF CODON ALTERED GENES” by Patten et al. filed Sep. 28, 1999, (U.S. Ser. No. 09/407,800); “EVOLUTION OF WHOLE CELLS AND ORGANISMS BY RECURSIVE SEQUENCE RECOMBINATION” by del Cardayre et al., filed Jul. 15, 1998 (U.S. Ser. No. 09/166,188), and Jul. 15, 1999 (U.S. Ser. No. 09/354,922); “OLIGONUCLEOTIDE MEDIATED NUCLEIC ACID RECOMBINATION” by Crameri et al., filed Sep. 28, 1999 (U.S. Ser. No. 09/408,392), and “OLIGONUCLEOTIDE MEDIATED NUCLEIC ACID RECOMBINATION” by Crameri et al., filed Jan. 18, 2000 (PCT/US00/01203); “USE OF CODON-VARIED OLIGONUCLEOTIDE SYNTHESIS FOR SYNTHETIC SHUFFLING” by Welch et al., filed Sep. 28, 1999 (U.S. Ser. No. 09/408,393); “METHODS FOR MAKING CHARACTER STRINGS, POLYNUCLEOTIDES & POLYPEPTIDES HAVING DESIRED CHARACTERISTICS” by Selifonov et al., filed Jan. 18, 2000, (PCT/US00/01202) and, e.g. “METHODS FOR MAKING CHARACTER STRINGS, POLYNUCLEOTIDES & POLYPEPTIDES HAVING DESIRED CHARACTERISTICS” by Selifonov et al., filed Jul. 18, 2000 (U.S. Ser. No. 09/618,579); “METHODS OF POPULATING DATA STRUCTURES FOR USE IN EVOLUTIONARY SIMULATIONS” by Selifonov and Stemmer, filed Jan. 18, 2000 (PCT/US00/01138); and “SINGLE-STRANDED NUCLEIC ACID TEMPLATE-MEDIATED RECOMBINATION AND NUCLEIC ACID FRAGMENT ISOLATION” by Affholter, filed Sep. 6, 2000 (U.S. Ser. No. 09/656,549).

[0232] Non-stochastic, or “directed evolution,” methods include, e.g., saturation mutagenesis (GSSM), synthetic ligation reassembly (SLR), or a combination thereof are used to modify the nucleic acids of the invention to generate polypeptides with new or altered properties (e.g., activity under highly acidic or alkaline conditions, high temperatures, and the like). Polypeptides encoded by the modified nucleic acids can be screened for an activity before testing for an enzyme or other activity. Any testing modality or protocol can be used, e.g., using a capillary array platform. See, e.g., U.S. Pat. Nos. 6,280,926; 5,939,250.

[0233] Saturation Mutagenesis, or, GSSM

[0234] In one aspect of the invention, non-stochastic gene modification, a “directed evolution process,” is used to generate polypeptides with new or altered properties. Variations of this method have been termed “gene site-saturation mutagenesis,” “site-saturation mutagenesis,” “saturation mutagenesis” or simply “GSSM.” It can be used in combination with other mutagenization processes. See, e.g., U.S. Pat. Nos. 6,171,820; 6,238,884. In one aspect, GSSM comprises providing a template polynucleotide and a plurality of oligonucleotides, wherein each oligonucleotide comprises a sequence homologous to the template polynucleotide, thereby targeting a specific sequence of the template polynucleotide, and a sequence that is a variant of the homologous gene; generating progeny polynucleotides comprising non-stochastic sequence variations by replicating the template polynucleotide with the oligonucleotides, thereby generating polynucleotides comprising homologous gene sequence variations.

[0235] In one aspect, codon primers containing a degenerate N,N,G/T sequence are used to introduce point mutations into a polynucleotide, so as to generate a set of progeny polypeptides in which a full range of single amino acid substitutions is represented at each amino acid position, e.g., an amino acid residue in an enzyme active site or ligand binding site targeted to be modified. These oligonucleotides can comprise a contiguous first homologous sequence, a degenerate N,N,G/T sequence, and, optionally, a second homologous sequence. The downstream progeny translational products from the use of such oligonucleotides include all possible amino acid changes at each amino acid site along the polypeptide, because the degeneracy of the N,N,G/T sequence includes codons for all 20 amino acids. In one aspect, one such degenerate oligonucleotide (comprised of, e.g., one degenerate N,N,G/T cassette) is used for subjecting each original codon in a parental polynucleotide template to a full range of codon substitutions. In another aspect, at least two degenerate cassettes are used—either in the same oligonucleotide or not, for subjecting at least two original codons in a parental polynucleotide template to a full range of codon substitutions. For example, more than one N,N,G/T sequence can be contained in one oligonucleotide to introduce amino acid mutations at more than one site. This plurality of N,N,G/T sequences can be directly contiguous, or separated by one or more additional nucleotide sequence(s). In another aspect, oligonucleotides serviceable for introducing additions and deletions can be used either alone or in combination with the codons containing an N,N,G/T sequence, to introduce any combination or permutation of amino acid additions, deletions, and/or substitutions.

[0236] In one aspect, simultaneous mutagenesis of two or more contiguous amino acid positions is done using an oligonucleotide that contains contiguous N,N,G/T triplets, i.e. a degenerate (N,N,G/T)n sequence. In another aspect, degenerate cassettes having less degeneracy than the N,N,G/T sequence are used. For example, it may be desirable in some instances to use (e.g. in an oligonucleotide) a degenerate triplet sequence comprised of only one N, where said N can be in the first second or third position of the triplet. Any other bases including any combinations and permutations thereof can be used in the remaining two positions of the triplet. Alternatively, it may be desirable in some instances to use (e.g. in an oligo) a degenerate N,N,N triplet sequence.

[0237] In one aspect, use of degenerate triplets (e.g., N,N,G/T triplets) allows for systematic and easy generation of a full range of possible natural amino acids (for a total of 20 amino acids) into each and every amino acid position in a polypeptide (in alternative aspects, the methods also include generation of less than all possible substitutions per amino acid residue, or codon, position). For example, for a 100 amino acid polypeptide, 2000 distinct species (i.e. 20 possible amino acids per position X 100 amino acid positions) can be generated. Through the use of an oligonucleotide or set of oligonucleotides containing a degenerate N,N,G/T triplet, 32 individual sequences can code for all 20 possible natural amino acids. Thus, in a reaction vessel in which a parental polynucleotide sequence is subjected to saturation mutagenesis using at least one such oligonucleotide, there are generated 32 distinct progeny polynucleotides encoding 20 distinct polypeptides. In contrast, the use of a non-degenerate oligonucleotide in site-directed mutagenesis leads to only one progeny polypeptide product per reaction vessel. Nondegenerate oligonucleotides can optionally be used in combination with degenerate primers disclosed; for example, nondegenerate oligonucleotides can be used to generate specific point mutations in a working polynucleotide. This provides one means to generate specific silent point mutations, point mutations leading to corresponding amino acid changes, and point mutations that cause the generation of stop codons and the corresponding expression of polypeptide fragments.

[0238] In one aspect, each saturation mutagenesis reaction vessel contains polynucleotides encoding at least 20 progeny polypeptide (e.g., enzyme) molecules such that all 20 natural amino acids are represented at the one specific amino acid position corresponding to the codon position mutagenized in the parental polynucleotide (other aspects use less than all 20 natural combinations). The 32-fold degenerate progeny polypeptides generated from each saturation mutagenesis reaction vessel can be subjected to clonal amplification (e.g. cloned into a suitable host, e.g., E. coli host, using, e.g., an expression vector) and subjected to expression screening. When an individual progeny polypeptide is identified by screening to display a favorable change in property (when compared to the parental polypeptide, such as increased enzyme activity under alkaline or acidic conditions), it can be sequenced to identify the correspondingly favorable amino acid substitution contained therein.

[0239] In one aspect, upon mutagenizing each and every amino acid position in a parental polypeptide using saturation mutagenesis as disclosed herein, favorable amino acid changes may be identified at more than one amino acid position. One or more new progeny molecules can be generated that contain a combination of all or part of these favorable amino acid substitutions. For example, if 2 specific favorable amino acid changes are identified in each of 3 amino acid positions in a polypeptide, the permutations include 3 possibilities at each position (no change from the original amino acid, and each of two favorable changes) and 3 positions. Thus, there are 3×3×3 or 27 total possibilities, including 7 that were previously examined—6 single point mutations (i.e. 2 at each of three positions) and no change at any position.

[0240] In another aspect, site-saturation mutagenesis can be used together with another stochastic or non-stochastic means to vary sequence, e.g., synthetic ligation reassembly (see below), shuffling, chimerization, recombination and other mutagenizing processes and mutagenizing agents. This invention provides for the use of any mutagenizing process(es), including saturation mutagenesis, in an iterative manner.

[0241] Synthetic Ligation Reassembly (SLR)

[0242] The invention provides a non-stochastic gene modification system termed “synthetic ligation reassembly,” or simply “SLR,” a “directed evolution process,” to generate polypeptides with new or altered properties. SLR is a method of ligating oligonucleotide fragments together non-stochastically. This method differs from stochastic oligonucleotide shuffling in that the nucleic acid building blocks are not shuffled, concatenated or chimerized randomly, but rather are assembled non-stochastically. See, e.g., U.S. patent application Ser. No. 09/332,835 entitled “Synthetic Ligation Reassembly in Directed Evolution” and filed on Jun. 14, 1999 (“U.S. Ser. No. 09/332,835”). In one aspect, SLR comprises the following steps: (a) providing a template polynucleotide, wherein the template polynucleotide comprises sequence encoding a homologous gene; (b) providing a plurality of building block polynucleotides, wherein the building block polynucleotides are designed to cross-over reassemble with the template polynucleotide at a predetermined sequence, and a building block polynucleotide comprises a sequence that is a variant of the homologous gene and a sequence homologous to the template polynucleotide flanking the variant sequence; (c) combining a building block polynucleotide with a template polynucleotide such that the building block polynucleotide cross-over reassembles with the template polynucleotide to generate polynucleotides comprising homologous gene sequence variations.

[0243] SLR does not depend on the presence of high levels of homology between polynucleotides to be rearranged. Thus, this method can be used to non-stochastically generate libraries (or sets) of progeny molecules comprised of over 10¹⁰⁰ different chimeras. SLR can be used to generate libraries comprised of over 10¹⁰⁰⁰ different progeny chimeras. Thus, aspects of the present invention include non-stochastic methods of producing a set of finalized chimeric nucleic acid molecule shaving an overall assembly order that is chosen by design. This method includes the steps of generating by design a plurality of specific nucleic acid building blocks having serviceable mutually compatible ligatable ends, and assembling these nucleic acid building blocks, such that a designed overall assembly order is achieved.

[0244] The mutually compatible ligatable ends of the nucleic acid building blocks to be assembled are considered to be “serviceable” for this type of ordered assembly if they enable the building blocks to be coupled in predetermined orders. Thus the overall assembly order in which the nucleic acid building blocks can be coupled is specified by the design of the ligatable ends. If more than one assembly step is to be used, then the overall assembly order in which the nucleic acid building blocks can be coupled is also specified by the sequential order of the assembly step(s). In one aspect, the annealed building pieces are treated with an enzyme, such as a ligase (e.g. T4 DNA ligase), to achieve covalent bonding of the building pieces.

[0245] In one aspect, the design of the oligonucleotide building blocks is obtained by analyzing a set of progenitor nucleic acid sequence templates that serve as a basis for producing a progeny set of finalized chimeric polynucleotides. These parental oligonucleotide templates thus serve as a source of sequence information that aids in the design of the nucleic acid building blocks that are to be mutagenized, e.g., chimerized or shuffled.

[0246] In one aspect of this method, the sequences of a plurality of parental nucleic acid templates are aligned in order to select one or more demarcation points. The demarcation points can be located at an area of homology, and are comprised of one or more nucleotides. These demarcation points are preferably shared by at least two of the progenitor templates. The demarcation points can thereby be used to delineate the boundaries of oligonucleotide building blocks to be generated in order to rearrange the parental polynucleotides. The demarcation points identified and selected in the progenitor molecules serve as potential chimerization points in the assembly of the final chimeric progeny molecules. A demarcation point can be an area of homology (comprised of at least one homologous nucleotide base) shared by at least two parental polynucleotide sequences. Alternatively, a demarcation point can be an area of homology that is shared by at least half of the parental polynucleotide sequences, or, it can be an area of homology that is shared by at least two thirds of the parental polynucleotide sequences. Even more preferably a serviceable demarcation points is an area of homology that is shared by at least three fourths of the parental polynucleotide sequences, or, it can be shared by at almost all of the parental polynucleotide sequences. In one aspect, a demarcation point is an area of homology that is shared by all of the parental polynucleotide sequences.

[0247] In one aspect, a ligation reassembly process is performed exhaustively in order to generate an exhaustive library of progeny chimeric polynucleotides. In other words, all possible ordered combinations of the nucleic acid building blocks are represented in the set of finalized chimeric nucleic acid molecules. At the same time, in another embodiment, the assembly order (i.e. the order of assembly of each building block in the 5′ to 3 sequence of each finalized chimeric nucleic acid) in each combination is by design (or non-stochastic) as described above. Because of the non-stochastic nature of this invention, the possibility of unwanted side products is greatly reduced.

[0248] In another aspect, the ligation reassembly method is performed systematically. For example, the method is performed in order to generate a systematically compartmentalized library of progeny molecules, with compartments that can be screened systematically, e.g. one by one. In other words this invention provides that, through the selective and judicious use of specific nucleic acid building blocks, coupled with the selective and judicious use of sequentially stepped assembly reactions, a design can be achieved where specific sets of progeny products are made in each of several reaction vessels. This allows a systematic examination and screening procedure to be performed. Thus, these methods allow a potentially very large number of progeny molecules to be examined systematically in smaller groups. Because of its ability to perform chimerizations in a manner that is highly flexible yet exhaustive and systematic as well, particularly when there is a low level of homology among the progenitor molecules, these methods provide for the generation of a library (or set) comprised of a large number of progeny molecules. Because of the non-stochastic nature of the instant ligation reassembly invention, the progeny molecules generated preferably comprise a library of finalized chimeric nucleic acid molecules having an overall assembly order that is chosen by design. The saturation mutagenesis and optimized directed evolution methods also can be used to generate different progeny molecular species. It is appreciated that the invention provides freedom of choice and control regarding the selection of demarcation points, the size and number of the nucleic acid building blocks, and the size and design of the couplings. It is appreciated, furthermore, that the requirement for intermolecular homology is highly relaxed for the operability of this invention. In fact, demarcation points can even be chosen in areas of little or no intermolecular homology. For example, because of codon wobble, i.e. the degeneracy of codons, nucleotide substitutions can be introduced into nucleic acid building blocks without altering the amino acid originally encoded in the corresponding progenitor template. Alternatively, a codon can be altered such that the coding for an originally amino acid is altered. This invention provides that such substitutions can be introduced into the nucleic acid building block in order to increase the incidence of intermolecularly homologous demarcation points and thus to allow an increased number of couplings to be achieved among the building blocks, which in turn allows a greater number of progeny chimeric molecules to be generated.

[0249] In another aspect, the synthetic nature of the step in which the building blocks are generated allows the design and introduction of nucleotides (e.g., one or more nucleotides, which may be, for example, codons or introns or regulatory sequences) that can later be optionally removed in an in vitro process (e.g. by mutagenesis) or in an in vivo process (e.g. by utilizing the gene splicing ability of a host organism). It is appreciated that in many instances the introduction of these nucleotides may also be desirable for many other reasons in addition to the potential benefit of creating a serviceable demarcation point.

[0250] In one aspect, a nucleic acid building block is used to introduce an intron. Thus, functional introns are introduced into a man-made gene manufactured according to the methods described herein. The artificially introduced intron(s) can be functional in a host cells for gene splicing much in the way that naturally-occurring introns serve functionally in gene splicing.

[0251] Optimized Directed Evolution System

[0252] The invention provides a non-stochastic gene modification system termed “optimized directed evolution system” to generate polypeptides with new or altered properties. Optimized directed evolution is directed to the use of repeated cycles of reductive reassortment, recombination and selection that allow for the directed molecular evolution of nucleic acids through recombination. Optimized directed evolution allows generation of a large population of evolved chimeric sequences, wherein the generated population is significantly enriched for sequences that have a predetermined number of crossover events.

[0253] A crossover event is a point in a chimeric sequence where a shift in sequence occurs from one parental variant to another parental variant. Such a point is normally at the juncture of where oligonucleotides from two parents are ligated together to form a single sequence. This method allows calculation of the correct concentrations of oligonucleotide sequences so that the final chimeric population of sequences is enriched for the chosen number of crossover events. This provides more control over choosing chimeric variants having a predetermined number of crossover events.

[0254] In addition, this method provides a convenient means for exploring a tremendous amount of the possible protein variant space in comparison to other systems. Previously, if one generated, for example, 10¹³ chimeric molecules during a reaction, it would be extremely difficult to test such a high number of chimeric variants for a particular activity. Moreover, a significant portion of the progeny population would have a very high number of crossover events which resulted in proteins that were less likely to have increased levels of a particular activity. By using these methods, the population of chimerics molecules can be enriched for those variants that have a particular number of crossover events. Thus, although one can still generate 10¹³ chimeric molecules during a reaction, each of the molecules chosen for further analysis most likely has, for example, only three crossover events. Because the resulting progeny population can be skewed to have a predetermined number of crossover events, the boundaries on the functional variety between the chimeric molecules is reduced. This provides a more manageable number of variables when calculating which oligonucleotide from the original parental polynucleotides might be responsible for affecting a particular trait.

[0255] One method for creating a chimeric progeny polynucleotide sequence is to create oligonucleotides corresponding to fragments or portions of each parental sequence. Each oligonucleotide preferably includes a unique region of overlap so that mixing the oligonucleotides together results in a new variant that has each oligonucleotide fragment assembled in the correct order. Additional information can also be found in U.S. Ser. No. 09/332,835. The number of oligonucleotides generated for each parental variant bears a relationship to the total number of resulting crossovers in the chimeric molecule that is ultimately created. For example, three parental nucleotide sequence variants might be provided to undergo a ligation reaction in order to find a chimeric variant having, for example, greater activity at high temperature. As one example, a set of 50 oligonucleotide sequences can be generated corresponding to each portions of each parental variant. Accordingly, during the ligation reassembly process there could be up to 50 crossover events within each of the chimeric sequences. The probability that each of the generated chimeric polynucleotides will contain oligonucleotides from each parental variant in alternating order is very low. If each oligonucleotide fragment is present in the ligation reaction in the same molar quantity it is likely that in some positions oligonucleotides from the same parental polynucleotide will ligate next to one another and thus not result in a crossover event. If the concentration of each oligonucleotide from each parent is kept constant during any ligation step in this example, there is a ⅓ chance (assuming 3 parents) that an oligonucleotide from the same parental variant will ligate within the chimeric sequence and produce no crossover.

[0256] Accordingly, a probability density function (PDF) can be determined to predict the population of crossover events that are likely to occur during each step in a ligation reaction given a set number of parental variants, a number of oligonucleotides corresponding to each variant, and the concentrations of each variant during each step in the ligation reaction. The statistics and mathematics behind determining the PDF is described below. By utilizing these methods, one can calculate such a probability density function, and thus enrich the chimeric progeny population for a predetermined number of crossover events resulting from a particular ligation reaction. Moreover, a target number of crossover events can be predetermined, and the system then programmed to calculate the starting quantities of each parental oligonucleotide during each step in the ligation reaction to result in a probability density function that centers on the predetermined number of crossover events. These methods are directed to the use of repeated cycles of reductive reassortment, recombination and selection that allow for the directed molecular evolution of a nucleic acid encoding an polypeptide through recombination. This system allows generation of a large population of evolved chimeric sequences, wherein the generated population is significantly enriched for sequences that have a predetermined number of crossover events. A crossover event is a point in a chimeric sequence where a shift in sequence occurs from one parental variant to another parental variant. Such a point is normally at the juncture of where oligonucleotides from two parents are ligated together to form a single sequence. The method allows calculation of the correct concentrations of oligonucleotide sequences so that the final chimeric population of sequences is enriched for the chosen number of crossover events. This provides more control over choosing chimeric variants having a predetermined number of crossover events.

[0257] In addition, these methods provide a convenient means for exploring a tremendous amount of the possible protein variant space in comparison to other systems. By using the methods described herein, the population of chimerics molecules can be enriched for those variants that have a particular number of crossover events. Thus, although one can still generate 10¹³ chimeric molecules during a reaction, each of the molecules chosen for further analysis most likely has, for example, only three crossover events. Because the resulting progeny population can be skewed to have a predetermined number of crossover events, the boundaries on the functional variety between the chimeric molecules is reduced. This provides a more manageable number of variables when calculating which oligonucleotide from the original parental polynucleotides might be responsible for affecting a particular trait.

[0258] In one aspect, the method creates a chimeric progeny polynucleotide sequence by creating oligonucleotides corresponding to fragments or portions of each parental sequence. Each oligonucleotide preferably includes a unique region of overlap so that mixing the oligonucleotides together results in a new variant that has each oligonucleotide fragment assembled in the correct order. See also U.S. Ser. No. 09/332,835.

[0259] The number of oligonucleotides generated for each parental variant bears a relationship to the total number of resulting crossovers in the chimeric molecule that is ultimately created. For example, three parental nucleotide sequence variants might be provided to undergo a ligation reaction in order to find a chimeric variant having, for example, greater activity at high temperature. As one example, a set of 50 oligonucleotide sequences can be generated corresponding to each portions of each parental variant. Accordingly, during the ligation reassembly process there could be up to 50 crossover events within each of the chimeric sequences. The probability that each of the generated chimeric polynucleotides will contain oligonucleotides from each parental variant in alternating order is very low. If each oligonucleotide fragment is present in the ligation reaction in the same molar quantity it is likely that in some positions oligonucleotides from the same parental polynucleotide will ligate next to one another and thus not result in a crossover event. If the concentration of each oligonucleotide from each parent is kept constant during any ligation step in this example, there is a ⅓ chance (assuming 3 parents) that a oligonucleotide from the same parental variant will ligate within the chimeric sequence and produce no crossover.

[0260] Accordingly, a probability density function (PDF) can be determined to predict the population of crossover events that are likely to occur during each step in a ligation reaction given a set number of parental variants, a number of oligonucleotides corresponding to each variant, and the concentrations of each variant during each step in the ligation reaction. The statistics and mathematics behind determining the PDF is described below. One can calculate such a probability density function, and thus enrich the chimeric progeny population for a predetermined number of crossover events resulting from a particular ligation reaction. Moreover, a target number of crossover events can be predetermined, and the system then programmed to calculate the starting quantities of each parental oligonucleotide during each step in the ligation reaction to result in a probability density function that centers on the predetermined number of crossover events.

[0261] Determining Crossover Events

[0262] Embodiments of the invention include a system and software that receive a desired crossover probability density function (PDF), the number of parent genes to be reassembled, and the number of fragments in the reassembly as inputs. The output of this program is a “fragment PDF” that can be used to determine a recipe for producing reassembled genes, and the estimated crossover PDF of those genes. The processing described herein is preferably performed in MATLAB® (The Mathworks, Natick, Mass.) a programming language and development environment for technical computing.

[0263] Iterative Processes

[0264] In practicing the invention, these processes can be iteratively repeated. For example a nucleic acid (or, the nucleic acid) responsible for an altered polypeptide (e.g., enzyme) phenotype is identified, re-isolated, again modified, re-tested for activity. This process can be iteratively repeated until a desired phenotype is engineered. For example, an entire biochemical anabolic or catabolic pathway can be engineered into a cell, including enzyme activity.

[0265] Similarly, if it is determined that a particular oligonucleotide has no affect at all on the desired trait (e.g., a new enzyme phenotype), it can be removed as a variable by synthesizing larger parental oligonucleotides that include the sequence to be removed. Since incorporating the sequence within a larger sequence prevents any crossover events, there will no longer be any variation of this sequence in the progeny polynucleotides. This iterative practice of determining which oligonucleotides are most related to the desired trait, and which are unrelated, allows more efficient exploration all of the possible protein variants that might be provide a particular trait or activity.

[0266] In Vivo Shuffling

[0267] In vivo shuffling of molecules is use in methods of the invention that provide variants of polypeptides of the invention, e.g., antibodies, enzymes, and the like. In vivo shuffling can be performed utilizing the natural property of cells to recombine multimers. While recombination in vivo has provided the major natural route to molecular diversity, genetic recombination remains a relatively complex process that involves 1) the recognition of homologies; 2) strand cleavage, strand invasion, and metabolic steps leading to the production of recombinant chiasma; and finally 3) the resolution of chiasma into discrete recombined molecules. The formation of the chiasma requires the recognition of homologous sequences.

[0268] In one aspect, the invention provides a method for producing a hybrid polynucleotide from at least a first polynucleotide and a second polynucleotide. The invention can be used to produce a hybrid polynucleotide by introducing at least a first polynucleotide and a second polynucleotide which share at least one region of partial sequence homology into a suitable host cell. The regions of partial sequence homology promote processes which result in sequence reorganization producing a hybrid polynucleotide. The term “hybrid polynucleotide”, as used herein, is any nucleotide sequence which results from the method of the present invention and contains sequence from at least two original polynucleotide sequences. Such hybrid polynucleotides can result from intermolecular recombination events which promote sequence integration between DNA molecules. In addition, such hybrid polynucleotides can result from intramolecular reductive reassortment processes which utilize repeated sequences to alter a nucleotide sequence within a DNA molecule.

[0269] Producing Sequence Variants

[0270] The invention also provides methods of making sequence variants of the nucleic acid and polypeptide sequences of the invention or isolating polypeptides, e.g., enzymes, sequence variants using the nucleic acids and polypeptides of the invention. In one aspect, the invention provides for variants of an polypeptide-encoding gene of the invention, which can be altered by any means, including, e.g., random or stochastic methods, or, non-stochastic, or “directed evolution,” methods, as described above.

[0271] The isolated variants may be naturally occurring. Variant can also be created in vitro. Variants may be created using genetic engineering techniques such as site directed mutagenesis, random chemical mutagenesis, Exonuclease III deletion procedures, and standard cloning techniques. Alternatively, such variants, fragments, analogs, or derivatives may be created using chemical synthesis or modification procedures. Other methods of making variants are also familiar to those skilled in the art. These include procedures in which nucleic acid sequences obtained from natural isolates are modified to generate nucleic acids which encode polypeptides having characteristics which enhance their value in industrial or laboratory applications. In such procedures, a large number of variant sequences having one or more nucleotide differences with respect to the sequence obtained from the natural isolate are generated and characterized. These nucleotide differences can result in amino acid changes with respect to the polypeptides encoded by the nucleic acids from the natural isolates.

[0272] For example, variants may be created using error prone PCR. In error prone PCR, PCR is performed under conditions where the copying fidelity of the DNA polymerase is low, such that a high rate of point mutations is obtained along the entire length of the PCR product. Error prone PCR is described, e.g., in Leung, D. W., et al., Technique, 1:11-15, 1989) and Caldwell, R. C. & Joyce G. F., PCR Methods Applic., 2:28-33, 1992. Briefly, in such procedures, nucleic acids to be mutagenized are mixed with PCR primers, reaction buffer, MgCl2, MnCl2, Taq polymerase and an appropriate concentration of dNTPs for achieving a high rate of point mutation along the entire length of the PCR product. For example, the reaction may be performed using 20 fmoles of nucleic acid to be mutagenized, 30 pmole of each PCR primer, a reaction buffer comprising 50 mM KCl, 110 mM Tris HCl (pH 8.3) and 0.01% gelatin, 7 mM MgCl₂, 0.5 mM MnCl₂, 5 units of Taq polymerase, 0.2 mM dGTP, 0.2 mM dATP, 1 mM dCTP, and 1 mM dTTP. PCR may be performed for 30 cycles of 94° C. for 1 min, 45° C. for 1 min, and 72° C. for 1 min. However, it will be appreciated that these parameters may be varied as appropriate. The mutagenized nucleic acids are cloned into an appropriate vector and the activities of the polypeptides encoded by the mutagenized nucleic acids is evaluated.

[0273] Variants may also be created using oligonucleotide directed mutagenesis to generate site-specific mutations in any cloned DNA of interest. Oligonucleotide mutagenesis is described, e.g., in Reidhaar-Olson (1988) Science 241:53-57. Briefly, in such procedures a plurality of double stranded oligonucleotides bearing one or more mutations to be introduced into the cloned DNA are synthesized and inserted into the cloned DNA to be mutagenized. Clones containing the mutagenized DNA are recovered and the activities of the polypeptides they encode are assessed.

[0274] Another method for generating variants is assembly PCR. Assembly PCR involves the assembly of a PCR product from a mixture of small DNA fragments. A large number of different PCR reactions occur in parallel in the same vial, with the products of one reaction priming the products of another reaction. Assembly PCR is described in, e.g., U.S. Pat. No. 5,965,408.

[0275] Still another method of generating variants is sexual PCR mutagenesis. In sexual PCR mutagenesis, forced homologous recombination occurs between DNA molecules of different but highly related DNA sequence in vitro, as a result of random fragmentation of the DNA molecule based on sequence homology, followed by fixation of the crossover by primer extension in a PCR reaction. Sexual PCR mutagenesis is described, e.g., in Stemmer (1994) Proc. Natl. Acad. Sci. USA 91:10747-10751. Briefly, in such procedures a plurality of nucleic acids to be recombined are digested with DNase to generate fragments having an average size of 50-200 nucleotides. Fragments of the desired average size are purified and resuspended in a PCR mixture. PCR is conducted under conditions which facilitate recombination between the nucleic acid fragments. For example, PCR may be performed by resuspending the purified fragments at a concentration of 10-30 ng/ul in a solution of 0.2 mM of each dNTP, 2.2 mM MgCl₂, 50 mM KCL, 10 mM Tris HCl, pH 9.0, and 0.1% Triton X-100. 2.5 units of Taq polymerase per 100:1 of reaction mixture is added and PCR is performed using the following regime: 94° C. for 60 seconds, 94° C. for 30 seconds, 50-55° C. for 30 seconds, 72° C. for 30 seconds (30-45 times) and 72° C. for 5 minutes. However, it will be appreciated that these parameters may be varied as appropriate. In some aspects, oligonucleotides may be included in the PCR reactions. In other aspects, the Klenow fragment of DNA polymerase I may be used in a first set of PCR reactions and Taq polymerase may be used in a subsequent set of PCR reactions. Recombinant sequences are isolated and the activities of the polypeptides they encode are assessed.

[0276] Variants may also be created by in vivo mutagenesis. In some embodiments, random mutations in a sequence of interest are generated by propagating the sequence of interest in a bacterial strain, such as an E. coli strain, which carries mutations in one or more of the DNA repair pathways. Such “mutator” strains have a higher random mutation rate than that of a wild-type parent. Propagating the DNA in one of these strains will eventually generate random mutations within the DNA. Mutator strains suitable for use for in vivo mutagenesis are described, e.g., in PCT Publication No. WO 91/16427.

[0277] Variants may also be generated using cassette mutagenesis. In cassette mutagenesis a small region of a double stranded DNA molecule is replaced with a synthetic oligonucleotide “cassette” that differs from the native sequence. The oligonucleotide often contains completely and/or partially randomized native sequence.

[0278] Recursive ensemble mutagenesis may also be used to generate variants. Recursive ensemble mutagenesis is an algorithm for protein engineering (protein mutagenesis) developed to produce diverse populations of phenotypically related mutants whose members differ in amino acid sequence. This method uses a feedback mechanism to control successive rounds of combinatorial cassette mutagenesis. Recursive ensemble mutagenesis is described, e.g., in Arkin (1992) Proc. Natl. Acad. Sci. USA 89:7811-7815.

[0279] In some embodiments, variants are created using exponential ensemble mutagenesis. Exponential ensemble mutagenesis is a process for generating combinatorial libraries with a high percentage of unique and functional mutants, wherein small groups of residues are randomized in parallel to identify, at each altered position, amino acids which lead to functional proteins. Exponential ensemble mutagenesis is described, e.g., in Delegrave (1993) Biotechnology Res. 11:1548-1552. Random and site-directed mutagenesis are described, e.g., in Arnold (1993) Current Opinion in Biotechnology 4:450-455.

[0280] In some embodiments, the variants are created using shuffling procedures wherein portions of a plurality of nucleic acids which encode distinct polypeptides are fused together to create chimeric nucleic acid sequences which encode chimeric polypeptides as described in, e.g., U.S. Pat. Nos. 5,965,408; 5,939,250.

[0281] The invention also provides variants of polypeptides of the invention comprising sequences in which one or more of the amino acid residues (e.g., of an exemplary polypeptide of the invention) are substituted with a conserved or non-conserved amino acid residue (e.g., a conserved amino acid residue) and such substituted amino acid residue may or may not be one encoded by the genetic code. Conservative substitutions are those that substitute a given amino acid in a polypeptide by another amino acid of like characteristics. Thus, polypeptides of the invention include those with conservative substitutions of sequences of the invention, including but not limited to the following replacements: replacements of an aliphatic amino acid such as Alanine, Valine, Leucine and Isoleucine with another aliphatic amino acid; replacement of a Serine with a Threonine or vice versa; replacement of an acidic residue such as Aspartic acid and Glutamic acid with another acidic residue; replacement of a residue bearing an amide group, such as Asparagine and Glutamine, with another residue bearing an amide group; exchange of a basic residue such as Lysine and Arginine with another basic residue; and replacement of an aromatic residue such as Phenylalanine, Tyrosine with another aromatic residue. Other variants are those in which one or more of the amino acid residues of the polypeptides of the invention includes a substituent group.

[0282] Other variants within the scope of the invention are those in which the polypeptide is associated with another compound, such as a compound to increase the half-life of the polypeptide, for example, polyethylene glycol.

[0283] Additional variants within the scope of the invention are those in which additional amino acids are fused to the polypeptide, such as a leader sequence, a secretory sequence, a proprotein sequence or a sequence which facilitates purification, enrichment, or stabilization of the polypeptide.

[0284] In some aspects, the variants, fragments, derivatives and analogs of the polypeptides of the invention retain the same biological function or activity as the exemplary polypeptides, e.g., an enzyme activity, as described herein. In other aspects, the variant, fragment, derivative, or analog includes a proprotein, such that the variant, fragment, derivative, or analog can be activated by cleavage of the proprotein portion to produce an active polypeptide.

### Optimizing Codons to Achieve High Levels of Protein Expression in Host Cells

[0285] The invention provides methods for modifying polypeptide-encoding nucleic acids to modify codon usage. In one aspect, the invention provides methods for modifying codons in a nucleic acid encoding a polypeptide to increase or decrease its expression in a host cell. The invention also provides nucleic acids encoding a polypeptide modified to increase its expression in a host cell, polypeptides so modified, and methods of making the modified polypeptides. The method comprises identifying a “non-preferred” or a “less preferred” codon in polypeptide-encoding nucleic acid and replacing one or more of these non-preferred or less preferred codons with a “preferred codon” encoding the same amino acid as the replaced codon and at least one non-preferred or less preferred codon in the nucleic acid has been replaced by a preferred codon encoding the same amino acid. A preferred codon is a codon over-represented in coding sequences in genes in the host cell and a non-preferred or less preferred codon is a codon under-represented in coding sequences in genes in the host cell.

[0286] Host cells for expressing the nucleic acids, expression cassettes and vectors of the invention include bacteria, yeast, fungi, plant cells, insect cells and mammalian cells. Thus, the invention provides methods for optimizing codon usage in all of these cells, codon-altered nucleic acids and polypeptides made by the codon-altered nucleic acids. Exemplary host cells include gram negative bacteria, such as Escherichia coli and Pseudomonas fluorescens; gram positive bacteria, such as Streptomyces diversa, Lactobacillus gasseri, Lactococcus lactis, Lactococcus cremoris, Bacillus subtilis. Exemplary host cells also include eukaryotic organisms, e.g., various yeast, such as Saccharomyces sp., including Saccharomyces cerevisiae, Schizosaccharomyces pombe, Pichia pastoris, and Kluyveromyces lactis, Hansenula polymorpha, Aspergillus niger, and mammalian cells and cell lines and insect cells and cell lines. Thus, the invention also includes nucleic acids and polypeptides optimized for expression in these organisms and species.

[0287] For example, the codons of a nucleic acid encoding an polypeptide isolated from a bacterial cell are modified such that the nucleic acid is optimally expressed in a bacterial cell different from the bacteria from which the polypeptide was derived, a yeast, a fungi, a plant cell, an insect cell or a mammalian cell. Methods for optimizing codons are well known in the art, see, e.g., U.S. Pat. No. 5,795,737; Baca (2000) Int. J. Parasitol. 30:113-118; Hale (1998) Protein Expr. Purif. 12:185-188; Narum (2001) Infect. Immun. 69:7250-7253. See also Narum (2001) Infect. Immun. 69:7250-7253, describing optimizing codons in mouse systems; Outchkourov (2002) Protein Expr. Purif. 24:18-24, describing optimizing codons in yeast; Feng (2000) Biochemistry 39:15399-15409, describing optimizing codons in E. coli; Humphreys (2000) Protein Expr. Purif. 20:252-264, describing optimizing codon usage that affects secretion in E. coli.

### Transgenic Non-Human Animals

[0288] The invention provides transgenic non-human animals comprising a nucleic acid, a polypeptide, an expression cassette or vector or a transfected or transformed cell of the invention. The transgenic non-human animals can be, e.g., goats, rabbits, sheep, pigs, cows, rats and mice, comprising the nucleic acids of the invention. These animals can be used, e.g., as in vivo models to study polypeptide activity, or, as models to screen for modulators of polypeptide activity in vivo. The coding sequences for the polypeptides to be expressed in the transgenic non-human animals can be designed to be constitutive, or, under the control of tissue-specific, developmental-specific or inducible transcriptional regulatory factors. Transgenic non-human animals can be designed and generated using any method known in the art; see, e.g., U.S. Pat. Nos. 6,211,428; 6,187,992; 6,156,952; 6,118,044; 6,111,166; 6,107,541; 5,959,171; 5,922,854; 5,892,070; 5,880,327; 5,891,698; 5,639,940; 5,573,933; 5,387,742; 5,087,571, describing making and using transformed cells and eggs and transgenic mice, rats, rabbits, sheep, pigs and cows. See also, e.g., Pollock (1999) J. Immunol. Methods 231:147-157, describing the production of recombinant proteins in the milk of transgenic dairy animals; Baguisi (1999) Nat. Biotechnol. 17:456-461, demonstrating the production of transgenic goats. U.S. Pat. No. 6,211,428, describes making and using transgenic non-human mammals which express in their brains a nucleic acid construct comprising a DNA sequence. U.S. Pat. No. 5,387,742, describes injecting cloned recombinant or synthetic DNA sequences into fertilized mouse eggs, implanting the injected eggs in pseudo-pregnant females, and growing to term transgenic mice whose cells express proteins related to the pathology of Alzheimer's disease. U.S. Pat. No. 6,187,992, describes making and using a transgenic mouse whose genome comprises a disruption of the gene encoding amyloid precursor protein (APP).

[0289] “Knockout animals” can also be used to practice the methods of the invention. For example, in one aspect, the transgenic or modified animals of the invention comprise a “knockout animal,” e.g., a “knockout mouse,” engineered not to express or to be unable to express a polypeptide.

### Transgenic Plants and Seeds

[0290] The invention provides transgenic plants and seeds comprising a nucleic acid, a polypeptide (e.g., an enzyme), an expression cassette or vector or a transfected or transformed cell of the invention. The invention also provides plant products, e.g., oils, seeds, leaves, extracts and the like, comprising a nucleic acid and/or a polypeptide (e.g., an enzyme) of the invention. The transgenic plant can be dicotyledonous (a dicot) or monocotyledonous (a monocot). The invention also provides methods of making and using these transgenic plants and seeds. The transgenic plant or plant cell expressing a polypeptide of the invention may be constructed in accordance with any method known in the art. See, for example, U.S. Pat. No. 6,309,872.

[0291] Nucleic acids and expression constructs of the invention can be introduced into a plant cell by any means. For example, nucleic acids or expression constructs can be introduced into the genome of a desired plant host, or, the nucleic acids or expression constructs can be episomes. Introduction into the genome of a desired plant can be such that the host's enzyme production is regulated by endogenous transcriptional or translational control elements. The invention also provides “knockout plants” where insertion of gene sequence by, e.g., homologous recombination, has disrupted the expression of the endogenous gene. Means to generate “knockout” plants are well-known in the art, see, e.g., Strepp (1998) Proc Natl. Acad. Sci. USA 95:4368-4373; Miao (1995) Plant J 7:359-365. See discussion on transgenic plants, below.

[0292] The nucleic acids of the invention can be used to confer desired traits on essentially any plant, e.g., on oil-seed containing plants, such as soybeans, rapeseed, sunflower seeds, sesame and peanuts. Nucleic acids of the invention can be used to manipulate metabolic pathways of a plant in order to optimize or alter host's expression of a polypeptide (e.g., an enzyme). This can change the polypeptide's activity (e.g., enzyme activity) in a plant. Alternatively, polypeptides of the invention can be used in production of a transgenic plant to produce a compound not naturally produced by that plant. This can lower production costs or create a novel product.

[0293] In one aspect, the first step in production of a transgenic plant involves making an expression construct for expression in a plant cell. These techniques are well known in the art. They can include selecting and cloning a promoter, a coding sequence for facilitating efficient binding of ribosomes to mRNA and selecting the appropriate gene terminator sequences. One exemplary constitutive promoter is CaMV35S, from the cauliflower mosaic virus, which generally results in a high degree of expression in plants. Other promoters are more specific and respond to cues in the plant's internal or external environment. An exemplary light-inducible promoter is the promoter from the cab gene, encoding the major chlorophyll a/b binding protein.

[0294] In one aspect, the nucleic acid is modified to achieve greater expression in a plant cell. For example, a sequence of the invention is likely to have a higher percentage of A-T nucleotide pairs compared to that seen in a plant, some of which prefer G-C nucleotide pairs. Therefore, A-T nucleotides in the coding sequence can be substituted with G-C nucleotides without significantly changing the amino acid sequence to enhance production of the gene product in plant cells.

[0295] Selectable marker gene can be added to the gene construct in order to identify plant cells or tissues that have successfully integrated the transgene. This may be necessary because achieving incorporation and expression of genes in plant cells is a rare event, occurring in just a few percent of the targeted tissues or cells. Selectable marker genes encode proteins that provide resistance to agents that are normally toxic to plants, such as antibiotics or herbicides. Only plant cells that have integrated the selectable marker gene will survive when grown on a medium containing the appropriate antibiotic or herbicide. As for other inserted genes, marker genes also require promoter and termination sequences for proper function.

[0296] In one aspect, making transgenic plants or seeds comprises incorporating sequences of the invention and, optionally, marker genes into a target expression construct (e.g., a plasmid), along with positioning of the promoter and the terminator sequences. This can involve transferring the modified gene into the plant through a suitable method. For example, a construct may be introduced directly into the genomic DNA of the plant cell using techniques such as electroporation and microinjection of plant cell protoplasts, or the constructs can be introduced directly to plant tissue using ballistic methods, such as DNA particle bombardment. For example, see, e.g., Christou (1997) Plant Mol. Biol. 35:197-203; Pawlowski (1996) Mol. Biotechnol. 6:17-30; Klein (1987) Nature 327:70-73; Takumi (1997) Genes Genet. Syst. 72:63-69, discussing use of particle bombardment to introduce transgenes into wheat; and Adam (1997) supra, for use of particle bombardment to introduce YACs into plant cells. For example, Rinehart (1997) supra, used particle bombardment to generate transgenic cotton plants. Apparatus for accelerating particles is described U.S. Pat. No. 5,015,580; and, the commercially available BioRad (Biolistics) PDS-2000 particle acceleration instrument; see also, John, U.S. Pat. No. 5,608,148; and Ellis, U.S. Pat. No. 5,681,730, describing particle-mediated transformation of gymnosperms.

[0297] In one aspect, protoplasts can be immobilized and injected with nucleic acids, e.g., an expression construct. Although plant regeneration from protoplasts is not easy with cereals, plant regeneration is possible in legumes using somatic embryogenesis from protoplast derived callus. Organized tissues can be transformed with naked DNA using gene gun technique, where DNA is coated on tungsten microprojectiles, shot 1/100th the size of cells, which carry the DNA deep into cells and organelles. Transformed tissue is then induced to regenerate, usually by somatic embryogenesis. This technique has been successful in several cereal species including maize and rice.

[0298] Nucleic acids, e.g., expression constructs, can also be introduced in to plant cells using recombinant viruses. Plant cells can be transformed using viral vectors, such as, e.g., tobacco mosaic virus derived vectors (Rouwendal (1997) Plant Mol. Biol. 33:989-999), see Porta (1996) “Use of viral replicons for the expression of genes in plants,” Mol. Biotechnol. 5:209-221.

[0299] Alternatively, nucleic acids, e.g., an expression construct, can be combined with suitable T-DNA flanking regions and introduced into a conventional Agrobacterium tumefaciens host vector. The virulence functions of the Agrobacterium tumefaciens host will direct the insertion of the construct and adjacent marker into the plant cell DNA when the cell is infected by the bacteria. Agrobacterium tumefaciens-mediated transformation techniques, including disarming and use of binary vectors, are well described in the scientific literature. See, e.g., Horsch (1984) Science 233:496-498; Fraley (1983) Proc. Natl. Acad. Sci. USA 80:4803 (1983); Gene Transfer to Plants, Potrykus, ed. (Springer-Verlag, Berlin 1995). The DNA in an A. tumefaciens cell is contained in the bacterial chromosome as well as in another structure known as a Ti (tumor-inducing) plasmid. The Ti plasmid contains a stretch of DNA termed T-DNA (˜20 kb long) that is transferred to the plant cell in the infection process and a series of vir (virulence) genes that direct the infection process. A. tumefaciens can only infect a plant through wounds: when a plant root or stem is wounded it gives off certain chemical signals, in response to which, the vir genes of A. tumefaciens become activated and direct a series of events necessary for the transfer of the T-DNA from the Ti plasmid to the plant's chromosome. The T-DNA then enters the plant cell through the wound. One speculation is that the T-DNA waits until the plant DNA is being replicated or transcribed, then inserts itself into the exposed plant DNA. In order to use A. tumefaciens as a transgene vector, the tumor-inducing section of T-DNA have to be removed, while retaining the T-DNA border regions and the vir genes. The transgene is then inserted between the T-DNA border regions, where it is transferred to the plant cell and becomes integrated into the plant's chromosomes.

[0300] The invention provides for the transformation of monocotyledonous plants using the nucleic acids of the invention, including important cereals, see Hiei (1997) Plant Mol. Biol. 35:205-218. See also, e.g., Horsch, Science (1984) 233:496; Fraley (1983) Proc. Natl. Acad. Sci USA 80:4803; Thykjaer (1997) supra; Park (1996) Plant Mol. Biol. 32:1135-1148, discussing T-DNA integration into genomic DNA. See also D'Halluin, U.S. Pat. No. 5,712,135, describing a process for the stable integration of a DNA comprising a gene that is functional in a cell of a cereal, or other monocotyledonous plant.

[0301] In one aspect, the third step can involve selection and regeneration of whole plants capable of transmitting the incorporated target gene to the next generation. Such regeneration techniques rely on manipulation of certain phytohormones in a tissue culture growth medium, typically relying on a biocide and/or herbicide marker that has been introduced together with the desired nucleotide sequences. Plant regeneration from cultured protoplasts is described in Evans et al., Protoplasts Isolation and Culture, Handbook of Plant Cell Culture, pp. 124-176, MacMillilan Publishing Company, New York, 1983; and Binding, Regeneration of Plants, Plant Protoplasts, pp. 21-73, CRC Press, Boca Raton, 1985. Regeneration can also be obtained from plant callus, explants, organs, or parts thereof. Such regeneration techniques are described generally in Klee (1987) Ann. Rev. of Plant Phys. 38:467-486. To obtain whole plants from transgenic tissues such as immature embryos, they can be grown under controlled environmental conditions in a series of media containing nutrients and hormones, a process known as tissue culture. Once whole plants are generated and produce seed, evaluation of the progeny begins.

[0302] After the expression cassette is stably incorporated in transgenic plants, it can be introduced into other plants by sexual crossing. Any of a number of standard breeding techniques can be used, depending upon the species to be crossed. Since transgenic expression of the nucleic acids of the invention leads to phenotypic changes, plants comprising the recombinant nucleic acids of the invention can be sexually crossed with a second plant to obtain a final product. Thus, the seed of the invention can be derived from a cross between two transgenic plants of the invention, or a cross between a plant of the invention and another plant. The desired effects (e.g., expression of the polypeptides of the invention to produce a plant in which flowering behavior is altered) can be enhanced when both parental plants express the polypeptides (e.g., an enzyme) of the invention. The desired effects can be passed to future plant generations by standard propagation means.

[0303] The nucleic acids and polypeptides of the invention are expressed in or inserted in any plant or seed. Transgenic plants of the invention can be dicotyledonous or monocotyledonous. Examples of monocot transgenic plants of the invention are grasses, such as meadow grass (blue grass, Poa), forage grass such as festuca, lolium, temperate grass, such as Agrostis, and cereals, e.g., wheat, oats, rye, barley, rice, sorghum, and maize (corn). Examples of dicot transgenic plants of the invention are tobacco, legumes, such as lupins, potato, sugar beet, pea, bean and soybean, and cruciferous plants (family Brassicaceae), such as cauliflower, rape seed, and the closely related model organism Arabidopsis thaliana. Thus, the transgenic plants and seeds of the invention include a broad range of plants, including, but not limited to, species from the genera Anacardium, Arachis, Asparagus, Atropa, Avena, Brassica, Citrus, Citrullus, Capsicum, Carthamus, Cocos, Coffea, Cucumis, Cucurbita, Daucus, Elaeis, Fragaria, Glycine, Gossypium, Helianthus, Heterocallis, Hordeum, Hyoscyamus, Lactuca, Linum, Lolium, Lupinus, Lycopersicon, Malus, Manihot, Majorana, Medicago, Nicotiana, Olea, Oryza, Panieum, Pannisetum, Persea, Phaseolus, Pistachia, Pisum, Pyrus, Prunus, Raphanus, Ricinus, Secale, Senecio, Sinapis, Solanum, Sorghum, Theobromus, Trigonella, Triticum, Vicia, Vitis, Vigna, and Zea.

[0304] In alternative embodiments, the nucleic acids of the invention are expressed in plants (e.g., as transgenic plants), such as oil-seed containing plants, e.g., soybeans, rapeseed, sunflower seeds, sesame and peanuts. The nucleic acids of the invention can be expressed in plants which contain fiber cells, including, e.g., cotton, silk cotton tree (Kapok, Ceiba pentandra), desert willow, creosote bush, winterfat, balsa, ramie, kenaf, hemp, roselle, jute, sisal abaca and flax. In alternative embodiments, the transgenic plants of the invention can be members of the genus Gossypium, including members of any Gossypium species, such as G. arboreum; G. herbaceum, G. barbadense, and G. hirsutum.

[0305] The invention also provides for transgenic plants to be used for producing large amounts of the polypeptides (e.g., an enzyme or antibody) of the invention. For example, see Palmgren (1997) Trends Genet. 13:348; Chong (1997) Transgenic Res. 6:289-296 (producing human milk protein beta-casein in transgenic potato plants using an auxin-inducible, bidirectional mannopine synthase (mas 1′,2′) promoter with Agrobacterium tumefaciens-mediated leaf disc transformation methods).

[0306] Using known procedures, one of skill can screen for plants of the invention by detecting the increase or decrease of transgene mRNA or protein in transgenic plants. Means for detecting and quantitation of mRNAs or proteins are well known in the art.

### Polypeptides and Peptides

[0307] The invention provides isolated or recombinant polypeptides having a sequence identity (e.g., at least 50%, 51%, 52%, 53%, 54%, 55%, 56%, 57%, 58%, 59%, 60%, 61%, 62%, 63%, 64%, 65%, 66%, 67%, 68%, 69%, 70%, 71%, 72%, 73%, 74%, 75%, 76%, 77%, 78%, 79%, 80%, 81%, 82%, 83%, 84%, 85%, 86%, 87%, 88%, 89%, 90%, 91%, 92%, 93%, 94%, 95%, 96%, 97%, 98%, 99%, or more, or complete (100%) sequence identity) to an exemplary sequence of the invention, e.g., SEQ ID NO:3, SEQ ID NO:5, SEQ ID NO:7, SEQ ID NO:9, SEQ ID NO:11, SEQ ID NO:13, SEQ ID NO:15, SEQ ID NO:17, SEQ ID NO:19, SEQ ID NO:21, SEQ ID NO:23, SEQ ID NO:25, SEQ ID NO:27, SEQ ID NO:29, SEQ ID NO:31, SEQ ID NO:33, SEQ ID NO:35, SEQ ID NO:37, SEQ ID NO:39, SEQ ID NO:41, SEQ ID NO:43, SEQ ID NO:45, SEQ ID NO:47, SEQ ID NO:49, SEQ ID NO:51, SEQ ID NO:53, SEQ ID NO:55, SEQ ID NO:57, SEQ ID NO:59, SEQ ID NO:61, SEQ ID NO:63, SEQ ID NO:65, SEQ ID NO:67, SEQ ID NO:69, SEQ ID NO:71, SEQ ID NO:73, SEQ ID NO:75, SEQ ID NO:77, SEQ ID NO:79, SEQ ID NO:81, SEQ ID NO:83, SEQ ID NO:85, SEQ ID NO:87, SEQ ID NO:89, SEQ ID NO:91, SEQ ID NO:93, SEQ ID NO:95, SEQ ID NO:97, SEQ ID NO:99, SEQ ID NO:101, SEQ ID NO:103, SEQ ID NO:105, and all polypeptides disclosed in the SEQ ID listing, which include all odd numbered SEQ ID NO:s from SEQ ID NO:3 through SEQ ID NO:1073. As discussed above, the identity can be over the full length of the polypeptide, or, the identity can be over a subsequence thereof, e.g., a region of at least about 50, 60, 70, 80, 90, 100, 150, 200, 250, 300, 350, 400, 450, 500, 550, 600, 650, 700 or more residues. Polypeptides of the invention can also be shorter than the full length of exemplary polypeptides. In alternative embodiment, the invention provides polypeptides (peptides, fragments) ranging in size between about 5 and the full length of a polypeptide, e.g., an enzyme, of the invention; exemplary sizes being of about 5, 10, 15, 20, 25, 30, 35, 40, 45, 50, 55, 60, 65, 70, 75, 80, 85, 90, 100, 125, 150, 175, 200, 250, 300, 350, 400 or more residues, e.g., contiguous residues of the exemplary polypeptide of the invention. Peptides of the invention can be useful as, e.g., labeling probes, antigens, toleragens, motifs, enzyme active sites.

[0308] In one aspect, the polypeptides, e.g., enzymes, of the invention are active at a high and/or at a low temperature, or, over a wide range of temperature, e.g., they can be active in the temperatures ranging between 20° C. to 90° C., between 30° C. to 80° C., or between 40° C. to 70° C. The invention also provides polypeptides, e.g., enzymes, having activity at alkaline pHs or at acidic pHs, e.g., low water acidity. In alternative aspects, the polypeptides, e.g., enzymes, of the invention can have activity in acidic pHs as low as pH 6.5, pH 6.0, pH 5.5, pH 5.0, pH 4.5, pH 4.0 and pH 3.5. In alternative aspects, the polypeptides, e.g., enzymes, of the invention can have activity in alkaline pHs as high as pH 7.5, pH 8.0, pH 8.5, pH 9.0, and pH 9.5. In one aspect, the polypeptide, e.g., enzymes, of the invention are active in the temperature range of between about 40° C. to about 70° C. under conditions of low water activity (low water content).

[0309] The invention also provides methods for further modifying the exemplary polypeptides of the invention to generate polypeptide (e.g., enzymes) with desirable properties. For example, enzymes generated by the methods of the invention can have altered substrate specificities, substrate binding specificities, substrate cleavage patterns, thermal stability, pH/activity profile, pH/stability profile (such as increased stability at low, e.g. pH<6 or pH<5, or high, e.g. pH>9, pH values), stability towards oxidation, Ca²⁺ dependency, specific activity and the like. The invention provides for altering any property of interest. For instance, the alteration may result in a variant which, as compared to a parent enzyme, has altered pH and temperature activity profile.

[0310] Polypeptides and peptides of the invention can be isolated from natural sources, be synthetic, or be recombinantly generated polypeptides. Peptides and proteins can be recombinantly expressed in vitro or in vivo. The peptides and polypeptides of the invention can be made and isolated using any method known in the art. Polypeptide and peptides of the invention can also be synthesized, whole or in part, using chemical methods well known in the art. See e.g., Caruthers (1980) Nucleic Acids Res. Symp. Ser. 215-223; Horn (1980) Nucleic Acids Res. Symp. Ser. 225-232; Banga, A. K., Therapeutic Peptides and Proteins, Formulation, Processing and Delivery Systems (1995) Technomic Publishing Co., Lancaster, Pa. For example, peptide synthesis can be performed using various solid-phase techniques (see e.g., Roberge (1995) Science 269:202; Merrifield (1997) Methods Enzymol. 289:3□13) and automated synthesis may be achieved, e.g., using the ABI 431A Peptide Synthesizer (Perkin Elmer) in accordance with the instructions provided by the manufacturer.

[0311] The peptides and polypeptides of the invention can also be glycosylated. The glycosylation can be added post-translationally either chemically or by cellular biosynthetic mechanisms, wherein the later incorporates the use of known glycosylation motifs, which can be native to the sequence or can be added as a peptide or added in the nucleic acid coding sequence. The glycosylation can be O-linked or N-linked.

[0312] The peptides and polypeptides of the invention, as defined above, include all “mimetic” and “peptidomimetic” forms. The terms “mimetic” and “peptidomimetic” refer to a synthetic chemical compound which has substantially the same structural and/or functional characteristics of the polypeptides of the invention. The mimetic can be either entirely composed of synthetic, non-natural analogues of amino acids, or, is a chimeric molecule of partly natural peptide amino acids and partly non-natural analogs of amino acids. The mimetic can also incorporate any amount of natural amino acid conservative substitutions as long as such substitutions also do not substantially alter the mimetic's structure and/or activity. As with polypeptides of the invention which are conservative variants, routine experimentation will determine whether a mimetic is within the scope of the invention, i.e., that its structure and/or function is not substantially altered. Thus, in one aspect, a mimetic composition is within the scope of the invention if it has the same activity as a polypeptide of the invention.

[0313] Polypeptide mimetic compositions of the invention can contain any combination of non-natural structural components. In alternative aspect, mimetic compositions of the invention include one or all of the following three structural groups: a) residue linkage groups other than the natural amide bond (“peptide bond”) linkages; b) non-natural residues in place of naturally occurring amino acid residues; or c) residues which induce secondary structural mimicry, i.e., to induce or stabilize a secondary structure, e.g., a beta turn, gamma turn, beta sheet, alpha helix conformation, and the like. For example, a polypeptide of the invention can be characterized as a mimetic when all or some of its residues are joined by chemical means other than natural peptide bonds. Individual peptidomimetic residues can be joined by peptide bonds, other chemical bonds or coupling means, such as, e.g., glutaraldehyde, N-hydroxysuccinimide esters, bifunctional maleimides, N,N′-dicyclohexylcarbodiimide (DCC) or N,N′-diisopropylcarbodiimide (DIC). Linking groups that can be an alternative to the traditional amide bond (“peptide bond”) linkages include, e.g., ketomethylene (e.g., —C(═O)—CH₂— for —C(═O)—NH—), aminomethylene (CH2-NH), ethylene, olefin (CH═CH), ether (CH2-O), thioether (CH2-S), tetrazole (CN4-), thiazole, retroamide, thioamide, or ester (see, e.g., Spatola (1983) in Chemistry and Biochemistry of Amino Acids, Peptides and Proteins, Vol. 7, pp 267-357, “Peptide Backbone Modifications,” Marcell Dekker, NY).

[0314] A polypeptide of the invention can also be characterized as a mimetic by containing all or some non-natural residues in place of naturally occurring amino acid residues. Non-natural residues are well described in the scientific and patent literature; a few exemplary non-natural compositions useful as mimetics of natural amino acid residues and guidelines are described below. Mimetics of aromatic amino acids can be generated by replacing by, e.g., D- or L-naphylalanine; D- or L-phenylglycine; D- or L-2 thieneylalanine; D- or L-1, -2, 3-, or 4-pyreneylalanine; D- or L-3 thieneylalanine; D- or L-(2-pyridinyl)-alanine; D- or L-(3-pyridinyl)-alanine; D- or L-(2-pyrazinyl)-alanine; D- or L-(4-isopropyl)-phenylglycine; D-(trifluoromethyl)-phenylglycine; D-(trifluoromethyl)-phenylalanine; D-p-fluoro-phenylalanine; D- or L-p-biphenylphenylalanine; K- or L-p-methoxy-biphenylphenylalanine; D- or L-2-indole(alkyl)alanines; and, D- or L-alkylainines, where alkyl can be substituted or unsubstituted methyl, ethyl, propyl, hexyl, butyl, pentyl, isopropyl, iso-butyl, sec-isotyl, iso-pentyl, or a non-acidic amino acids. Aromatic rings of a non-natural amino acid include, e.g., thiazolyl, thiophenyl, pyrazolyl, benzimidazolyl, naphthyl, furanyl, pyrrolyl, and pyridyl aromatic rings.

[0315] Mimetics of acidic amino acids can be generated by substitution by, e.g., non-carboxylate amino acids while maintaining a negative charge; (phosphono)alanine; sulfated threonine. Carboxyl side groups (e.g., aspartyl or glutamyl) can also be selectively modified by reaction with carbodiimides (R′—N—C—N—R′) such as, e.g., 1-cyclohexyl-3(2-morpholinyl-(4-ethyl) carbodiimide or 1-ethyl-3(4-azonia-4,4-dimetholpentyl) carbodiimide. Aspartyl or glutamyl can also be converted to asparaginyl and glutaminyl residues by reaction with ammonium ions. Mimetics of basic amino acids can be generated by substitution with, e.g., (in addition to lysine and arginine) the amino acids ornithine, citrulline, or (guanidino)-acetic acid, or (guanidino)alkyl-acetic acid, where alkyl is defined above. Nitrile derivative (e.g., containing the CN-moiety in place of COOH) can be substituted for asparagine or glutamine. Asparaginyl and glutaminyl residues can be deaminated to the corresponding aspartyl or glutamyl residues. Arginine residue mimetics can be generated by reacting arginyl with, e.g., one or more conventional reagents, including, e.g., phenylglyoxal, 2,3-butanedione, 1,2-cyclo-hexanedione, or ninhydrin, preferably under alkaline conditions. Tyrosine residue mimetics can be generated by reacting tyrosyl with, e.g., aromatic diazonium compounds or tetranitromethane. N-acetylimidizol and tetranitromethane can be used to form O-acetyl tyrosyl species and 3-nitro derivatives, respectively. Cysteine residue mimetics can be generated by reacting cysteinyl residues with, e.g., alpha-haloacetates such as 2-chloroacetic acid or chloroacetamide and corresponding amines; to give carboxymethyl or carboxyamidomethyl derivatives. Cysteine residue mimetics can also be generated by reacting cysteinyl residues with, e.g., bromo-trifluoroacetone, alpha-bromo-beta-(5-imidozoyl) propionic acid; chloroacetyl phosphate, N-alkylmaleimides, 3-nitro-2-pyridyl disulfide; methyl 2-pyridyl disulfide; p-chloromercuribenzoate; 2-chloromercuri-4 nitrophenol; or, chloro-7-nitrobenzo-oxa-1,3-diazole. Lysine mimetics can be generated (and amino terminal residues can be altered) by reacting lysinyl with, e.g., succinic or other carboxylic acid anhydrides. Lysine and other alpha-amino-containing residue mimetics can also be generated by reaction with imidoesters, such as methyl picolinimidate, pyridoxal phosphate, pyridoxal, chloroborohydride, trinitro-benzenesulfonic acid, O-methylisourea, 2,4, pentanedione, and transamidase-catalyzed reactions with glyoxylate. Mimetics of methionine can be generated by reaction with, e.g., methionine sulfoxide. Mimetics of proline include, e.g., pipecolic acid, thiazolidine carboxylic acid, 3- or 4-hydroxy proline, dehydroproline, 3- or 4-methylproline, or 3,3,-dimethylproline. Histidine residue mimetics can be generated by reacting histidyl with, e.g., diethylprocarbonate or para-bromophenacyl bromide. Other mimetics include, e.g., those generated by hydroxylation of proline and lysine; phosphorylation of the hydroxyl groups of seryl or threonyl residues; methylation of the alpha-amino groups of lysine, arginine and histidine; acetylation of the N-terminal amine; methylation of main chain amide residues or substitution with N-methyl amino acids; or amidation of C-terminal carboxyl groups.

[0316] A residue, e.g., an amino acid, of a polypeptide of the invention can also be replaced by an amino acid (or peptidomimetic residue) of the opposite chirality. Thus, any amino acid naturally occurring in the L-configuration (which can also be referred to as the R or S, depending upon the structure of the chemical entity) can be replaced with the amino acid of the same chemical structural type or a peptidomimetic, but of the opposite chirality, referred to as the D-amino acid, but also can be referred to as the R— or S— form.

[0317] The invention also provides methods for modifying the polypeptides of the invention by either natural processes, such as post-translational processing (e.g., phosphorylation, acylation, etc), or by chemical modification techniques, and the resulting modified polypeptides. Modifications can occur anywhere in the polypeptide, including the peptide backbone, the amino acid side-chains and the amino or carboxyl termini. It will be appreciated that the same type of modification may be present in the same or varying degrees at several sites in a given polypeptide. Also a given polypeptide may have many types of modifications. Modifications include acetylation, acylation, ADP-ribosylation, amidation, covalent attachment of flavin, covalent attachment of a heme moiety, covalent attachment of a nucleotide or nucleotide derivative, covalent attachment of a lipid or lipid derivative, covalent attachment of a phosphatidylinositol, cross-linking cyclization, disulfide bond formation, demethylation, formation of covalent cross-links, formation of cysteine, formation of pyroglutamate, formylation, gamma-carboxylation, glycosylation, GPI anchor formation, hydroxylation, iodination, methylation, myristolyation, oxidation, pegylation, proteolytic processing, phosphorylation, prenylation, racemization, selenoylation, sulfation, and transfer-RNA mediated addition of amino acids to protein such as arginylation. See, e.g., Creighton, T. E., Proteins—Structure and Molecular Properties 2nd Ed., W.H. Freeman and Company, New York (1993); Posttranslational Covalent Modification of Proteins, B. C. Johnson, Ed., Academic Press, New York, pp. 1-12 (1983).

[0318] Solid-phase chemical peptide synthesis methods can also be used to synthesize the polypeptide or fragments of the invention. Such method have been known in the art since the early 1960's (Merrifield, R. B., J. Am. Chem. Soc., 85:2149-2154, 1963) (See also Stewart, J. M. and Young, J. D., Solid Phase Peptide Synthesis, 2nd Ed., Pierce Chemical Co., Rockford, Ill., pp. 11-12)) and have recently been employed in commercially available laboratory peptide design and synthesis kits (Cambridge Research Biochemicals). Such commercially available laboratory kits have generally utilized the teachings of H. M. Geysen et al, Proc. Natl. Acad. Sci., USA, 81:3998 (1984) and provide for synthesizing peptides upon the tips of a multitude of “rods” or “pins” all of which are connected to a single plate. When such a system is utilized, a plate of rods or pins is inverted and inserted into a second plate of corresponding wells or reservoirs, which contain solutions for attaching or anchoring an appropriate amino acid to the pin's or rod's tips. By repeating such a process step, i.e., inverting and inserting the rod's and pin's tips into appropriate solutions, amino acids are built into desired peptides. In addition, a number of available FMOC peptide synthesis systems are available. For example, assembly of a polypeptide or fragment can be carried out on a solid support using an Applied Biosystems, Inc. Model 431A™ automated peptide synthesizer. Such equipment provides ready access to the peptides of the invention, either by direct synthesis or by synthesis of a series of fragments that can be coupled using other known techniques.

[0319] Enzymes

[0320] The invention provides novel enzymes, nucleic acids encoding them, antibodies that bind them, peptides representing the enzyme's antigenic sites (epitopes) and active sites, and methods for making and using them. In one aspect, polypeptides of the invention have an enzyme activity, as described herein, see, e.g., Table 3. In alternative aspects, the enzymes of the invention have activities that have been modified from those of the exemplary enzymes described herein. The invention includes enzymes with and without signal sequences and the signal sequences themselves. The invention includes immobilized enzymes, anti-enzyme antibodies and fragments thereof. The invention includes heterocomplexes, e.g., fusion proteins, heterodimers, etc., comprising the enzymes of the invention.

[0321] Any of the many enzyme activity assays known in the art can be used to determine if a polypeptide has an enzyme activity and is within the scope of the invention. Routine protocols for determining enzyme activities are well known in the art.

[0322] Determining peptides representing the enzyme's antigenic sites (epitopes), active sites, binding sites, signal sequences, and the like can be done by routine screening protocols.

[0323] The enzymes of the invention are highly selective catalysts. As with other enzymes, they catalyze reactions with exquisite stereo-, regio-, and chemo-selectivities that are unparalleled in conventional synthetic chemistry. Moreover, the enzymes of the invention are remarkably versatile. They can be tailored to function in organic solvents, operate at extreme pHs (for example, high pHs and low pHs) extreme temperatures (for example, high temperatures and low temperatures), extreme salinity levels (for example, high salinity and low salinity), and catalyze reactions with compounds that are structurally unrelated to their natural, physiological substrates. Enzymes of the invention can be designed to be reactive toward a wide range of natural and unnatural substrates, thus enabling the modification of virtually any organic lead compound. Enzymes of the invention can also be designed to be highly enantio- and regio-selective. The high degree of functional group specificity exhibited by these enzymes enables one to keep track of each reaction in a synthetic sequence leading to a new active compound. Enzymes of the invention can also be designed to catalyze many diverse reactions unrelated to their native physiological function in nature.

[0324] The present invention exploits the unique catalytic properties of enzymes. Whereas the use of biocatalysts (i.e., purified or crude enzymes, non-living or living cells) in chemical transformations normally requires the identification of a particular biocatalyst that reacts with a specific starting compound. The present invention uses selected biocatalysts, i.e., the enzymes of the invention, and reaction conditions that are specific for functional groups that are present in many starting compounds. Each biocatalyst is specific for one functional group, or several related functional groups, and can react with many starting compounds containing this functional group. The biocatalytic reactions produce a population of derivatives from a single starting compound. These derivatives can be subjected to another round of biocatalytic reactions to produce a second population of derivative compounds. Thousands of variations of the original compound can be produced with each iteration of biocatalytic derivatization.

[0325] Enzymes react at specific sites of a starting compound without affecting the rest of the molecule, a process that is very difficult to achieve using traditional chemical methods. This high degree of biocatalytic specificity provides the means to identify a single active enzyme within a library. The library is characterized by the series of biocatalytic reactions used to produce it, a so-called “biosynthetic history”. Screening the library for biological activities and tracing the biosynthetic history identifies the specific reaction sequence producing the active compound. The reaction sequence is repeated and the structure of the synthesized compound determined. This mode of identification, unlike other synthesis and screening approaches, does not require immobilization technologies, and compounds can be synthesized and tested free in solution using virtually any type of screening assay. It is important to note, that the high degree of specificity of enzyme reactions on functional groups allows for the “tracking” of specific enzymatic reactions that make up the biocatalytically produced library.

[0326] The invention also provides methods of discovering new enzymes using the nucleic acids, polypeptides and antibodies of the invention. In one aspect, lambda phage libraries are screened for expression-based discovery of enzymes. Use of lambda phage libraries in screening allows detection of toxic clones; improved access to substrate; reduced need for engineering a host, by-passing the potential for any bias resulting from mass excision of the library; and, faster growth at low clone densities. Screening of lambda phage libraries can be in liquid phase or in solid phase. Screening in liquid phase gives greater flexibility in assay conditions; additional substrate flexibility; higher sensitivity for weak clones; and ease of automation over solid phase screening.

[0327] Many of the procedural steps are performed using robotic automation enabling the execution of many thousands of biocatalytic reactions and screening assays per day as well as ensuring a high level of accuracy and reproducibility (see discussion of arrays, below). As a result, a library of derivative compounds can be produced in a matter of weeks. For further teachings on modification of molecules, including small molecules, see PCT/US94/09174.

[0328] Signal Sequences, Prepro Domains and Catalytic Domains

[0329] The invention provides signal sequences (e.g., signal peptides (SPs)), prepro domains, and catalytic domains (CDs). The invention provides nucleic acids encoding these catalytic domains (CDs) and signal sequences (SPs, e.g., a peptide having a sequence comprising/consisting of amino terminal residues of a polypeptide of the invention). In one aspect, the invention provides a signal sequence comprising a peptide comprising/consisting of a sequence as set forth in residues 1 to 20, 1 to 21, 1 to 22, 1 to 23, 1 to 24, 1 to 25, 1 to 26, 1 to 27, 1 to 28, 1 to 28, 1 to 30, 1 to 31, 1 to 32 or 1 to 33 of a polypeptide of the invention, e.g., SEQ ID NO:3, SEQ NO:5, etc. as set forth in the SEQ ID listing.

[0330] Exemplary signal sequences are set forth as follows (e.g., SEQ ID NO:1038 encodes signal peptide SEQ ID NO:1039, etc.):

| | | |
|---|---|---|
| SEQ ID NO: | Signalp Prediction | Signal Sequence |

| | | | |
|---|---|---|---|
| 1038, 1039 | Cleavage site: | AA1 28 AA2 29 | MIELLLYGLFYILGIFLISFFASHSYSA |
| | Probability: | 0.824 | |
| 108, 109 | Cleavage site: | AA1 36 AA2 37 | MDILKYFKLLLAAILSILIILIIFKLLYYIAFLL |
| | Probability: | 0.674 | YT |
| 146, 147 | Cleavage site: | AA1 34 AA2 35 | MDRSIELSLHLIVYAILSLLVLSLVFMFFSKS |
| | Probability: | 0.876 | QS |
| 172, 173 | Cleavage site: | AA1 24 AA2 25 | MKRTIILLLSALALGVALSQIAFL |
| | Probability: | 1 | |
| 196, 197 | Cleavage site: | AA1 25 AA2 26 | MQRIIPFLFLILVLVFLSLIPKSCK |
| | Probability: | 0.599 | |
| 202, 203 | Cleavage site: | AA1 67 AA2 68 | MHYRRAMSITFKNSKHKRNMRRSIELPISVV |
| | Probability: | 1 | LFAIIGLMVFSILLGFIPKVLGSLLGGFMSSVS |
| | | | ATK |
| 220, 221 | Cleavage site: | AA1 27 AA2 28 | MNSKDILIYASISSLLLMSFILFQTHR |
| | Probability: | 0.524 | |
| 270, 271 | Cleavage site: | AA1 30 AA2 31 | MRGAISTIVYILIGLIGAAFSLILMNSVFE |
| | Probability: | 0.759 | |
| 274, 275 | Cleavage site: | AA1 29 AA2 30 | MFRFSKMISWLGSLIILIMFLGVVSIVFN |
| | Probability: | 0.998 | |
| 276, 277 | Cleavage site: | AA1 39 AA2 40 | MRALSNIIWLISAIVVALMSIAIISFSFFKTVN |
| | Probability: | 0.999 | PLAALS |
| 282, 283 | Cleavage site: | AA1 21 AA2 22 | MFFIFKIFRLLFALPLIMLLA |
| | Probability: | 0.889 | |
| 308, 309 | Cleavage site: | AA1 38 AA2 39 | MIAINYMNLEMRDVVLGLVFVIAMAVAAVI |
| | Probability: | 0.973 | GAPSLALA |
| 310, 311 | Cleavage site: | AA1 38 AA2 39 | MAQTKTKTQIRLKMLEKIEKYKEPVFLILLF |
| | Probability: | 0.796 | LSGFLFK |
| 318, 319 | Cleavage site: | AA1 28 AA2 29 | MEKKVLIAIPLLLSVGFIFYYFSPPSNN |
| | Probability: | 0.962 | |
| 322, 323 | Cleavage site: | AA1 33 AA2 34 | MKLPILILLAVVLIIVFFILLPFIPYIATGAVIA |
| | Probability: | 0.978 | |
| 328, 329 | Cleavage site: | AA1 25 AA2 26 | MDYNIFINIVLSSFVVALASSLVTV |
| | Probability: | 0.782 | |
| 378, 379 | Cleavage site: | AA1 19 AA2 20 | MLPLILILLSALFSSYETA |
| | Probability: | 0.953 | |
| 390, 391 | Cleavage site: | AA1 24 AA2 25 | MFALIIQLSSYALAFILSPLFVLS |
| | Probability: | 0.876 | |
| 394, 395 | Cleavage site: | AA1 18 AA2 19 | MKSLIAFIAFIITGFLAT |
| | Probability: | 0.567 | |
| 430, 431 | Cleavage site: | AA1 31 AA2 32 | MDLALASALAIGLAAFGSAIAQGLAASAAA |
| | Probability: | 1 | A |
| 440, 441 | Cleavage site: | AA1 20 AA2 21 | MRKLLSLPLITFFVLGLSVG |
| | Probability: | 0.864 | |
| 468, 469 | Cleavage site: | AA1 20 AA2 21 | MKKMFVPLMAAMPFLAIGLA |
| | Probability: | 0.997 | |
| 488, 489 | Cleavage site: | AA1 25 AA2 26 | MRRALESVNYLILLALSLFIALFVA |
| | Probability: | 0.954 | |
| 500, 501 | Cleavage site: | AA1 19 AA2 20 | MILLLLLPLALSAVVYTNT |
| | Probability: | 0.999 | |
| 506, 507 | Cleavage site: | AA1 28 AA2 29 | MTLNMKNLRKKVWLFSLILLGIVLVFLS |
| | Probability: | 0.95 | |
| 524, 525 | Cleavage site: | AA1 22 AA2 23 | MKTRFTLLLSLLLLNSIPIAIS |
| | Probability: | 0.997 | |
| 534, 535 | Cleavage site: | AA1 16 AA2 17 | MKKVFLSLLLVSTAFA |
| | Probability: | 0.997 | |
| 546, 547 | Cleavage site: | AA1 34 AA2 35 | MFGFYFKVYGALALLIAIALFAGYLFIDPNT |
| | Probability: | 0.795 | REK |
| 550, 551 | Cleavage site: | AA1 30 AA2 31 | MNKSDIVILAFFFVSLGLGILTLLPANTVK |
| | Probability: | 0.907 | |
| 58, 59 | Cleavage site: | AA1 22 AA2 23 | MKAKKLLIFVPLLLLPLLTLLM |
| | Probability: | 0.608 | |
| 586, 587 | Cleavage site: | AA1 24 AA2 25 | MKTLAKAQVVLASGMLLAGAVAQN |
| | Probability: | 0.998 | |
| 608, 609 | Cleavage site: | AA1 26 AA2 27 | MRAFYSIALFSILTLISLLIAHVLIT |
| | Probability: | 0.972 | |
| 64, 65 | Cleavage site: | AA1 55 AA2 56 | MMNVIDRIMRKIPLPKKFVYKIEEKAKNYIIK |
| | Probability: | 0.984 | EGPKLAPKLASVLTILAGAGLAMA |
| 646, 647 | Cleavage site: | AA1 36 AA2 37 | MSVKKWQEQLKNFLNNLDKHSILIGVAAGII |
| | Probability: | 0.974 | LAVSA |
| 66, 67 | Cleavage site: | AA1 23 AA2 24 | MLRLIILFLTIIGALAINVNVYS |
| | Probability: | 0.986 | |
| 70, 71 | Cleavage site: | AA1 16 AA2 17 | MKRFLPAVVVLGLALA |
| | Probability: | 1 | |
| 718, 719 | Cleavage site: | AA1 20 AA2 21 | MKKLFWVLAIPLALSAVQLK |
| | Probability: | 0.963 | |
| 738, 739 | Cleavage site: | AA1 25 AA2 26 | MRAVSWVLGLVVAIVLSLISFFIVS |
| | Probability: | 0.922 | |
| 746, 747 | Cleavage site: | AA1 46 AA2 47 | MNLILLAEILFSLTSIFFAALILKPFLVFNIFAT |
| | Probability: | 0.713 | LFGKQFACKSFA |
| 768, 769 | Cleavage site: | AA1 18 AA2 19 | MRHYFLASLLIFTPIAVS |
| | Probability: | 0.946 | |
| 796, 797 | Cleavage site: | AA1 18 AA2 19 | MLKFIALLIVSYIMELLA |
| | Probability: | 0.538 | |
| 80, 81 | Cleavage site: | AA1 20 AA2 21 | MHELVFALISILFLSLIAFK |
| | Probability: | 0.657 | |
| 806, 807 | Cleavage site: | AA1 42 AA2 43 | MMKKKFEEALTKFEEFGLVTLALAFVFLVL |
| | Probability: | 0.83 | VLYPLFMGVAFA |
| 810, 811 | Cleavage site: | AA1 22 AA2 23 | MKLNTLKNLLPIIFFFLGYFFA |
| | Probability: | 0.859 | |
| 854, 855 | Cleavage site: | AA1 23 AA2 24 | MKKKLIGLAFSLSILLFSIYVLV |
| | Probability: | 1 | |
| 866, 867 | Cleavage site: | AA1 22 AA2 23 | MFRRSITPIIAVVMMLMMTVMA |
| | Probability: | 1 | |
| 868, 869 | Cleavage site: | AA1 24 AA2 25 | MKSQSHLIEFVLVIGIALAGLSSA |
| | Probability: | 0.838 | |
| 888, 889 | Cleavage site: | AA1 27 AA2 28 | MGILTKILIKHKLLPFILFIIMGYLFA |
| | Probability: | 0.979 | |
| 894, 895 | Cleavage site: | AA1 20 AA2 21 | MRGINALIAIIVLVAIVGLA |
| | Probability: | 0.991 | |
| 902, 903 | Cleavage site: | AA1 29 AA2 30 | MKYSKFLFTWLVLSSALSLVWPANFPLVS |
| | Probability: | 0.969 | |
| 912, 913 | Cleavage site: | AA1 26 AA2 27 | MRKINMYYLLLLGILFMLSGCVNLSN |
| | Probability: | 0.998 | |
| 930, 931 | Cleavage site: | AA1 19 AA2 20 | MRRSSIFTLVFYALVGATA |
| | Probability: | 0.814 | |
| 948, 949 | Cleavage site: | AA1 22 AA2 23 | MLVSTLFNSFLILVSLFFLLFG |
| | Probability: | 0.86 | |
| 958, 959 | Cleavage site: | AA1 19 AA2 20 | MRTKVGLILFALPIVPALA |
| | Probability: | 1 | |
| 96, 97 | Cleavage site: | AA1 29 AA2 30 | MRSVSLTLNTIVMIALAISVFSILFIVLS |
| | Probability: | 0.97 | |
| 972, 973 | Cleavage site: | AA1 20 AA2 21 | MRSITPIIAIVILLLVTISA |
| | Probability: | 0.941 | |

[0331] The signal sequences of the invention can be isolated peptides, or, sequences joined to another polypeptide, e.g., as a fusion protein. In one aspect, the invention provides polypeptides comprising signal sequences of the invention. In one aspect, polypeptides comprising signal sequences of the invention comprise sequences heterologous to an enzyme of the invention (e.g., a fusion protein comprising a signal sequence of the invention and sequences from another polypeptide or a non-enzyme protein). In one aspect, the invention provides polypeptides of the invention with heterologous signal sequences, e.g., sequences with a yeast signal sequence. An enzyme of the invention can comprise a heterologous signal sequence, e.g., in a vector, e.g., a pPIC series vector (Invitrogen, Carlsbad, Calif.).

[0332] In one aspect, the signal sequences of the invention are identified following identification of novel polypeptides, e.g., enzymes. The pathways by which proteins are sorted and transported to their proper cellular location are often referred to as protein targeting pathways. One of the most important elements in all of these targeting systems is a short amino acid sequence at the amino terminus of a newly synthesized polypeptide called the signal sequence. This signal sequence directs a protein to its appropriate location in the cell and is removed during transport or when the protein reaches its final destination. Most lysosomal, membrane, or secreted proteins have an amino-terminal signal sequence that marks them for translocation into the lumen of the endoplasmic reticulum. More than 100 signal sequences for proteins in this group have been determined. The signal sequences can vary in length from 13 to 36 amino acid residues. Various methods of recognition of signal sequences are known to those of skill in the art. For example, in one aspect, novel polypeptide signal peptides are identified by a method referred to as SignalP. SignalP uses a combined neural network which recognizes both signal peptides and their cleavage sites. (Nielsen, et al., “Identification of prokaryotic and eukaryotic signal peptides and prediction of their cleavage sites.” Protein Engineering, vol. 10, no. 1, p. 1-6 (1997).

[0333] It should be understood that in some aspects polypeptides of the invention may not have signal sequences. In one aspect, the invention provides the polypeptides of the invention lacking all or part of a signal sequence. In one aspect, the invention provides a nucleic acid sequence encoding a signal sequence from one polypeptide operably linked to a nucleic acid sequence of a different.

[0334] The invention also provides isolated or recombinant polypeptides comprising signal sequences (SPs) and catalytic domains (CDs) of the invention and heterologous sequences. The heterologous sequences are sequences not naturally associated (e.g., to an enzyme) with an SP and/or CD. The sequence to which the SP and/or CD are not naturally associated can be on the SP's, and/or CD's amino terminal end, carboxy terminal end, and/or on both ends of the SP and/or CD. In one aspect, the invention provides an isolated or recombinant polypeptide comprising (or consisting of) a polypeptide comprising a signal sequence (SP) and/or catalytic domain (CD) of the invention with the proviso that it is not associated with any sequence to which it is naturally associated (e.g., an enzyme sequence). Similarly in one aspect, the invention provides isolated or recombinant nucleic acids encoding these polypeptides. Thus, in one aspect, the isolated or recombinant nucleic acid of the invention comprises coding sequence for a signal sequence (SP) and/or catalytic domain (CD) of the invention and a heterologous sequence (i.e., a sequence not naturally associated with the a signal sequence (SP) and/or catalytic domain (CD) of the invention). The heterologous sequence can be on the 3′ terminal end, 5′ terminal end, and/or on both ends of the SP and/or CD coding sequence.

### Hybrid (Chimeric) Polypeptides and Peptide Libraries

[0335] In one aspect, the invention provides hybrid polypeptides and fusion proteins, including peptide libraries, comprising sequences of the invention. The peptide libraries of the invention can be used to isolate peptide modulators (e.g., activators or inhibitors) of targets, such as enzyme substrates, receptors, enzymes. The peptide libraries of the invention can be used to identify formal binding partners of targets, such as ligands, e.g., cytokines, hormones and the like. In one aspect, the invention provides chimeric proteins comprising a signal sequence (SP) and/or catalytic domain (CD) of the invention and a heterologous sequence (see above).

[0336] The invention also provides methods for generating “improved” and hybrid polypeptides using the nucleic acids and polypeptides of the invention. The invention provides methods for generating hybrid polypeptides (e.g., hybrid enzymes).

[0337] In one aspect, the methods of the invention produce new hybrid polypeptides by utilizing cellular processes that integrate the sequence of a first polynucleotide such that resulting hybrid polynucleotides encode polypeptides demonstrating activities derived from the first biologically active polypeptides. For example, the first polynucleotides can be an exemplary nucleic acid sequence (e.g., SEQ ID NO:1, SEQ ID NO:2, SEQ ID NO:4, SEQ ID NO:6, SEQ ID NO:8, SEQ ID NO:10, etc., including all nucleic acids disclosed in the SEQ ID listing, which include all even numbered SEQ ID NO:s from SEQ ID NO:2 through SEQ ID NO:1073) encoding an exemplary polypeptide of the invention. The first nucleic acid can encode a polypeptide from one organism that functions effectively under a particular environmental condition, e.g. high salinity. It can be “integrated” with an polypeptide encoded by a second polynucleotide from a different organism that functions effectively under a different environmental condition, such as extremely high temperatures. For example, when the two nucleic acids can produce a hybrid molecule by e.g., recombination and/or reductive reassortment. A hybrid polynucleotide containing sequences from the first and second original polynucleotides may encode an polypeptide that exhibits characteristics of both polypeptides encoded by the original polynucleotides. Thus, the polypeptide encoded by the hybrid polynucleotide may function effectively under environmental conditions shared by each of the polypeptides encoded by the first and second polynucleotides, e.g., high salinity and extreme temperatures.

[0338] Alternatively, a hybrid polypeptide resulting from this method of the invention may exhibit specialized polypeptide activity not displayed in the original polypeptides. For example, following recombination and/or reductive reassortment of polynucleotides encoding polypeptide activities, the resulting hybrid polypeptide encoded by a hybrid polynucleotide can be screened for specialized activities obtained from each of the original polypeptides, for example, the type of bond on which an enzyme acts and the temperature at which the enzyme functions. Thus, for example, an enzyme may be screened to ascertain those chemical functionalities which distinguish the hybrid enzyme from the original enzymes, such as: (a) amide (peptide bonds), i.e., enzymes; (b) ester bonds, i.e., amylases and lipases; (c) acetals, i.e., glycosidases and, for example, the temperature, pH or salt concentration at which the hybrid polypeptide functions.

[0339] Sources of the polynucleotides to be “integrated” with nucleic acids of the invention may be isolated from individual organisms (“isolates”), collections of organisms that have been grown in defined media (“enrichment cultures”), or, uncultivated organisms (“environmental samples”). The use of a culture-independent approach to derive polynucleotides encoding novel bioactivities from environmental samples is most preferable since it allows one to access untapped resources of biodiversity. “Environmental libraries” are generated from environmental samples and represent the collective genomes of naturally occurring organisms archived in cloning vectors that can be propagated in suitable prokaryotic hosts. Because the cloned DNA is initially extracted directly from environmental samples, the libraries are not limited to the small fraction of prokaryotes that can be grown in pure culture. Additionally, a normalization of the environmental DNA present in these samples could allow more equal representation of the DNA from all of the species present in the original sample. This can dramatically increase the efficiency of finding interesting genes from minor constituents of the sample that may be under-represented by several orders of magnitude compared to the dominant species.

[0340] For example, gene libraries generated from one or more uncultivated microorganisms are screened for an activity of interest. Potential pathways encoding bioactive molecules of interest are first captured in prokaryotic cells in the form of gene expression libraries. Polynucleotides encoding activities of interest are isolated from such libraries and introduced into a host cell. The host cell is grown under conditions that promote recombination and/or reductive reassortment creating potentially active biomolecules with novel or enhanced activities.

[0341] The microorganisms from which hybrid polynucleotides may be prepared include prokaryotic microorganisms, such as Eubacteria and Archaebacteria, and lower eukaryotic microorganisms such as fungi, some algae and protozoa. Polynucleotides may be isolated from environmental samples. Nucleic acid may be recovered without culturing of an organism or recovered from one or more cultured organisms. In one aspect, such microorganisms may be extremophiles, such as hyperthermophiles, psychrophiles, psychrotrophs, halophiles, barophiles and acidophiles. In one aspect, polynucleotides encoding polypeptides isolated from extremophilic microorganisms are used to make hybrid polypeptides. Such polypeptides may function at temperatures above 100° C. in, e.g., terrestrial hot springs and deep sea thermal vents, at temperatures below 0° C. in, e.g., arctic waters, in the saturated salt environment of, e.g., the Dead Sea, at pH values around 0 in, e.g., coal deposits and geothermal sulfur-rich springs, or at pH values greater than 11 in, e.g., sewage sludge. For example, polypeptides cloned and expressed from extremophilic organisms can show high activity throughout a wide range of temperatures and pHs.

[0342] Polynucleotides selected and isolated as described herein, including at least one nucleic acid of the invention, are introduced into a suitable host cell. A suitable host cell is any cell that is capable of promoting recombination and/or reductive reassortment. The selected polynucleotides can be in a vector that includes appropriate control sequences. The host cell can be a higher eukaryotic cell, such as a mammalian cell, or a lower eukaryotic cell, such as a yeast cell, or preferably, the host cell can be a prokaryotic cell, such as a bacterial cell. Introduction of the construct into the host cell can be effected by calcium phosphate transfection, DEAE-Dextran mediated transfection, or electroporation (Davis et al., 1986).

[0343] As representative examples of appropriate hosts, there may be mentioned: bacterial cells, such as E. coli, Streptomyces, Salmonella typhimurium; fungal cells, such as yeast; insect cells such as Drosophila S2 and Spodoptera Sf9; animal cells such as CHO, COS or Bowes melanoma; adenoviruses; and plant cells. The selection of an appropriate host for recombination and/or reductive reassortment or just for expression of recombinant protein is deemed to be within the scope of those skilled in the art from the teachings herein. Mammalian cell culture systems that can be employed for recombination and/or reductive reassortment or just for expression of recombinant protein include, e.g., the COS-7 lines of monkey kidney fibroblasts, described in “SV40-transformed simian cells support the replication of early SV40 mutants” (Gluzman, 1981), the C127, 3T3, CHO, HeLa and BHK cell lines. Mammalian expression vectors can comprise an origin of replication, a suitable promoter and enhancer, and necessary ribosome binding sites, polyadenylation site, splice donor and acceptor sites, transcriptional termination sequences, and 5′ flanking non-transcribed sequences. DNA sequences derived from the SV40 splice, and polyadenylation sites may be used to provide the required non-transcribed genetic elements.

[0344] Host cells containing the polynucleotides of interest (for recombination and/or reductive reassortment or just for expression of recombinant protein) can be cultured in conventional nutrient media modified as appropriate for activating promoters, selecting transformants or amplifying genes. The culture conditions, such as temperature, pH and the like, are those previously used with the host cell selected for expression, and will be apparent to the ordinarily skilled artisan. The clones which are identified as having the specified polypeptide activity may then be sequenced to identify the polynucleotide sequence encoding polypeptides having the enhanced activity.

[0345] In another aspect, the nucleic acids and methods of the present invention can be used to generate novel polynucleotides for biochemical pathways, e.g., pathways from one or more operons or gene clusters or portions thereof. For example, bacteria and many eukaryotes have a coordinated mechanism for regulating genes whose products are involved in related processes. The genes are clustered, in structures referred to as “gene clusters,” on a single chromosome and are transcribed together under the control of a single regulatory sequence, including a single promoter which initiates transcription of the entire cluster. Thus, a gene cluster is a group of adjacent genes that are either identical or related, usually as to their function.

[0346] Gene cluster DNA can be isolated from different organisms and ligated into vectors, particularly vectors containing expression regulatory sequences which can control and regulate the production of a detectable protein or protein-related array activity from the ligated gene clusters. Use of vectors which have an exceptionally large capacity for exogenous DNA introduction are particularly appropriate for use with such gene clusters and are described by way of example herein to include the f-factor (or fertility factor) of E. coli. This f-factor of E. coli is a plasmid which affects high-frequency transfer of itself during conjugation and is ideal to achieve and stably propagate large DNA fragments, such as gene clusters from mixed microbial samples. “Fosmids,” cosmids or bacterial artificial chromosome (BAC) vectors can be used as cloning vectors. These are derived from E. coli f-factor which is able to stably integrate large segments of genomic DNA. When integrated with DNA from a mixed uncultured environmental sample, this makes it possible to achieve large genomic fragments in the form of a stable “environmental DNA library.” Cosmid vectors were originally designed to clone and propagate large segments of genomic DNA. Cloning into cosmid vectors is described in detail in Sambrook et al., Molecular Cloning: A Laboratory Manual, 2nd Ed., Cold Spring Harbor Laboratory Press (1989). Once ligated into an appropriate vector, two or more vectors containing different polyketide synthase gene clusters can be introduced into a suitable host cell. Regions of partial sequence homology shared by the gene clusters will promote processes which result in sequence reorganization resulting in a hybrid gene cluster. The novel hybrid gene cluster can then be screened for enhanced activities not found in the original gene clusters.

[0347] Thus, in one aspect, the invention relates to a method for producing a biologically active hybrid polypeptide using a nucleic acid of the invention and screening the polypeptide for an activity (e.g., enhanced activity) by:

[0348] (1) introducing at least a first polynucleotide (e.g., a nucleic acid of the invention) in operable linkage and a second polynucleotide in operable linkage, said at least first polynucleotide and second polynucleotide sharing at least one region of partial sequence homology, into a suitable host cell;

[0349] (2) growing the host cell under conditions which promote sequence reorganization resulting in a hybrid polynucleotide in operable linkage;

[0350] (3) expressing a hybrid polypeptide encoded by the hybrid polynucleotide;

[0351] (4) screening the hybrid polypeptide under conditions which promote identification of the desired biological activity (e.g., enhanced enzyme activity); and

[0352] (5) isolating the a polynucleotide encoding the hybrid polypeptide.

[0353] Methods for screening for various polypeptide (e.g., enzyme) activities are known to those of skill in the art and are discussed throughout the present specification. Such methods may be employed when isolating the polypeptides and polynucleotides of the invention.

[0354] In vivo reassortment can be focused on “inter-molecular” processes collectively referred to as “recombination.” In bacteria it is generally viewed as a “RecA-dependent” phenomenon. The invention can rely on recombination processes of a host cell to recombine and re-assort sequences, or the cells' ability to mediate reductive processes to decrease the complexity of quasi-repeated sequences in the cell by deletion. This process of “reductive reassortment” occurs by an “intra-molecular”, RecA-independent process. Thus, in one aspect of the invention, using the nucleic acids of the invention novel polynucleotides are generated by the process of reductive reassortment. The method involves the generation of constructs containing consecutive sequences (original encoding sequences), their insertion into an appropriate vector, and their subsequent introduction into an appropriate host cell. The reassortment of the individual molecular identities occurs by combinatorial processes between the consecutive sequences in the construct possessing regions of homology, or between quasi-repeated units. The reassortment process recombines and/or reduces the complexity and extent of the repeated sequences, and results in the production of novel molecular species.

[0355] Various treatments may be applied to enhance the rate of reassortment. These could include treatment with ultra-violet light, or DNA damaging chemicals, and/or the use of host cell lines displaying enhanced levels of “genetic instability”. Thus the reassortment process may involve homologous recombination or the natural property of quasi-repeated sequences to direct their own evolution.

[0356] Repeated or “quasi-repeated” sequences play a role in genetic instability. “Quasi-repeats” are repeats that are not restricted to their original unit structure. Quasi-repeated units can be presented as an array of sequences in a construct; consecutive units of similar sequences. Once ligated, the junctions between the consecutive sequences become essentially invisible and the quasi-repetitive nature of the resulting construct is now continuous at the molecular level. The deletion process the cell performs to reduce the complexity of the resulting construct operates between the quasi-repeated sequences. The quasi-repeated units provide a practically limitless repertoire of templates upon which slippage events can occur. The constructs containing the quasi-repeats thus effectively provide sufficient molecular elasticity that deletion (and potentially insertion) events can occur virtually anywhere within the quasi-repetitive units. When the quasi-repeated sequences are all ligated in the same orientation, for instance head to tail or vice versa, the cell cannot distinguish individual units. Consequently, the reductive process can occur throughout the sequences. In contrast, when for example, the units are presented head to head, rather than head to tail, the inversion delineates the endpoints of the adjacent unit so that deletion formation will favor the loss of discrete units. Thus, in one aspect of the invention, the sequences to be reassorted are in the same orientation. Random orientation of quasi-repeated sequences will result in the loss of reassortment efficiency, while consistent orientation of the sequences will offer the highest efficiency. However, while having fewer of the contiguous sequences in the same orientation decreases the efficiency, it may still provide sufficient elasticity for the effective recovery of novel molecules. Constructs can be made with the quasi-repeated sequences in the same orientation to allow higher efficiency.

[0357] Sequences can be assembled in a head to tail orientation using any of a variety of methods, including the following: a) Primers that include a poly-A head and poly-T tail which when made single-stranded would provide orientation can be utilized. This is accomplished by having the first few bases of the primers made from RNA and hence easily removed RNase H. b) Primers that include unique restriction cleavage sites can be utilized. Multiple sites, a battery of unique sequences, and repeated synthesis and ligation steps would be required. c) The inner few bases of the primer could be thiolated and an exonuclease used to produce properly tailed molecules.

[0358] The recovery of the re-assorted sequences relies on the identification of cloning vectors with a reduced repetitive index (R1). The re-assorted encoding sequences can then be recovered by amplification. The products are re-cloned and expressed. The recovery of cloning vectors with reduced R1 can be affected by: 1) The use of vectors only stably maintained when the construct is reduced in complexity. 2) The physical recovery of shortened vectors by physical procedures. In this case, the cloning vector would be recovered using standard plasmid isolation procedures and size fractionated on either an agarose gel, or column with a low molecular weight cut off utilizing standard procedures. 3) The recovery of vectors containing interrupted genes which can be selected when insert size decreases. 4) The use of direct selection techniques with an expression vector and the appropriate selection.

[0359] Encoding sequences (for example, genes) from related organisms may demonstrate a high degree of homology and encode quite diverse protein products. These types of sequences are particularly useful in the present invention as quasi-repeats. However, this process is not limited to such nearly identical repeats.

[0360] The following is an exemplary method of the invention. Encoding nucleic acid sequences (quasi-repeats) are derived from three (3) species, including a nucleic acid of the invention. Each sequence encodes a protein with a distinct set of properties, including a polypeptide, e.g., an enzyme, of the invention. Each of the sequences differs by a single or a few base pairs at a unique position in the sequence. The quasi-repeated sequences are separately or collectively amplified and ligated into random assemblies such that all possible permutations and combinations are available in the population of ligated molecules. The number of quasi-repeat units can be controlled by the assembly conditions. The average number of quasi-repeated units in a construct is defined as the repetitive index (R1). Once formed, the constructs may, or may not be size fractionated on an agarose gel according to published protocols, inserted into a cloning vector, and transfected into an appropriate host cell. The cells are then propagated and “reductive reassortment” is effected. The rate of the reductive reassortment process may be stimulated by the introduction of DNA damage if desired. Whether the reduction in R1 is mediated by deletion formation between repeated sequences by an “intra-molecular” mechanism, or mediated by recombination-like events through “inter-molecular” mechanisms is immaterial. The end result is a reassortment of the molecules into all possible combinations. In one aspect, the method comprises the additional step of screening the library members of the shuffled pool to identify individual shuffled library members having the ability to bind or otherwise interact, or catalyze a particular reaction (e.g., such as catalytic domain of an enzyme) with a predetermined macromolecule, such as for example a proteinaceous receptor, an oligosaccharide, virion, or other predetermined compound or structure. The polypeptides, e.g., enzymes, that are identified from such libraries can be used for various purposes, e.g., the industrial processes described herein and/or can be subjected to one or more additional cycles of shuffling and/or selection.

[0361] In another aspect, it is envisioned that prior to or during recombination or reassortment, polynucleotides generated by the method of the invention can be subjected to agents or processes which promote the introduction of mutations into the original polynucleotides. The introduction of such mutations would increase the diversity of resulting hybrid polynucleotides and polypeptides encoded therefrom. The agents or processes which promote mutagenesis can include, but are not limited to: (+)-CC-1065, or a synthetic analog such as (+)-CC-1065-(N3-Adenine (See Sun and Hurley, (1992); an N-acetylated or deacetylated 4′-fluoro-4-aminobiphenyl adduct capable of inhibiting DNA synthesis (See, for example, van de Poll et al. (1992)); or a N-acetylated or deacetylated 4-aminobiphenyl adduct capable of inhibiting DNA synthesis (See also, van de Poll et al. (1992), pp. 751-758); trivalent chromium, a trivalent chromium salt, a polycyclic aromatic hydrocarbon (PAH) DNA adduct capable of inhibiting DNA replication, such as 7-bromomethyl-benz[a]anthracene (“BMA”), tris(2,3-dibromopropyl)phosphate (“Tris-BP”), 1,2-dibromo-3-chloropropane (“DBCP”), 2-bromoacrolein (2BA), benzo[a]pyrene-7,8-dihydrodiol-9-10-epoxide (“BPDE”), a platinum(II) halogen salt, N-hydroxy-2-amino-3-methylimidazo[4,5-f]-quinoline (“N-hydroxy-IQ”), and N-hydroxy-2-amino-1-methyl-6-phenylimidazo[4,5-f]-pyridine (“N-hydroxy-PhIP”). Especially preferred means for slowing or halting PCR amplification consist of UV light (+)-CC-1065 and (+)-CC-1065-(N3-Adenine). Particularly encompassed means are DNA adducts or polynucleotides comprising the DNA adducts from the polynucleotides or polynucleotides pool, which can be released or removed by a process including heating the solution comprising the polynucleotides prior to further processing.

### Screening Methodologies and “On-Line” Monitoring Devices

[0362] In practicing the methods of the invention, a variety of apparatus and methodologies can be used to in conjunction with the polypeptides and nucleic acids of the invention, e.g., to screen polypeptides for enzyme activity, to screen compounds as potential modulators of activity (e.g., potentiation or inhibition of enzyme activity), for antibodies that bind to a polypeptide of the invention, for nucleic acids that hybridize to a nucleic acid of the invention, and the like.

[0363] Immobilized Polypeptide Solid Supports

[0364] The polypeptides, fragments thereof and nucleic acids that encode the enzymes and fragments can be affixed to a solid support. This is often economical and efficient in the use of polypeptides, e.g., antibodies, enzymes, ligands, in industrial processes. For example, a consortium or cocktail of polypeptides (e.g., enzymes or active fragments thereof), which are used in a specific chemical reaction, can be attached to a solid support and dunked into a process vat. The enzymatic reaction can occur. Then, the solid support can be taken out of the vat, along with the enzymes affixed thereto, for repeated use. In one embodiment of the invention, an isolated nucleic acid of the invention is affixed to a solid support. In another embodiment of the invention, the solid support is selected from the group of a gel, a resin, a polymer, a ceramic, a glass, a microelectrode and any combination thereof.

[0365] For example, solid supports useful in this invention include gels. Some examples of gels include Sepharose, gelatin, glutaraldehyde, chitosan-treated glutaraldehyde, albumin-glutaraldehyde, chitosan-Xanthan, toyopearl gel (polymer gel), alginate, alginate-polylysine, carrageenan, agarose, glyoxyl agarose, magnetic agarose, dextran-agarose, poly(Carbamoyl Sulfonate) hydrogel, BSA-PEG hydrogel, phosphorylated polyvinyl alcohol (PVA), monoaminoethyl-N-aminoethyl (MANA), amino, or any combination thereof.

[0366] Another solid support useful in the present invention are resins or polymers. Some examples of resins or polymers include cellulose, acrylamide, nylon, rayon, polyester, anion-exchange resin, AMBERLITE™ XAD-7, AMBERLITE™ XAD-8, AMBERLITE™ IRA-94, AMBERLITE™ IRC-50, polyvinyl, polyacrylic, polymethacrylate, or any combination thereof.

[0367] Another type of solid support useful in the present invention is ceramic. Some examples include non-porous ceramic, porous ceramic, SiO₂, Al₂O₃. Another type of solid support useful in the present invention is glass. Some examples include non-porous glass, porous glass, aminopropyl glass or any combination thereof. Another type of solid support that can be used is a microelectrode. An example is a polyethyleneimine-coated magnetite. Graphitic particles can be used as a solid support.

[0368] Another example of a solid support is a cell, such as a red blood cell.

[0369] Methods of Immobilization

[0370] There are many methods that would be known to one of skill in the art for immobilizing polypeptides (e.g., antibodies, enzymes, binding proteins, or fragments thereof), or nucleic acids, onto a solid support. Some examples of such methods include, e.g., electrostatic droplet generation, electrochemical means, via adsorption, via covalent binding, via cross-linking, via a chemical reaction or process, via encapsulation, via entrapment, via calcium alginate, or via poly(2-hydroxyethyl methacrylate). Like methods are described in Methods in Enzymology, Immobilized Enzymes and Cells, Part C. 1987. Academic Press. Edited by S. P. Colowick and N, O. Kaplan. Volume 136; and Immobilization of Enzymes and Cells. 1997. Humana Press. Edited by G. F. Bickerstaff. Series: Methods in Biotechnology, Edited by J. M. Walker.

[0371] Capillary Arrays

[0372] Capillary arrays, such as the GIGAMATRIX™, Diversa Corporation, San Diego, Calif., can be used to in the methods of the invention. Nucleic acids or polypeptides of the invention can be immobilized to or applied to an array, including capillary arrays. Arrays can be used to screen for or monitor libraries of compositions (e.g., small molecules, antibodies, nucleic acids, etc.) for their ability to bind to or modulate the activity of a nucleic acid or a polypeptide of the invention. Capillary arrays provide another system for holding and screening samples. For example, a sample screening apparatus can include a plurality of capillaries formed into an array of adjacent capillaries, wherein each capillary comprises at least one wall defining a lumen for retaining a sample. The apparatus can further include interstitial material disposed between adjacent capillaries in the array, and one or more reference indicia formed within of the interstitial material. A capillary for screening a sample, wherein the capillary is adapted for being bound in an array of capillaries, can include a first wall defining a lumen for retaining the sample, and a second wall formed of a filtering material, for filtering excitation energy provided to the lumen to excite the sample.

[0373] A polypeptide or nucleic acid, e.g., a ligand, can be introduced into a first component into at least a portion of a capillary of a capillary array. Each capillary of the capillary array can comprise at least one wall defining a lumen for retaining the first component. An air bubble can be introduced into the capillary behind the first component. A second component can be introduced into the capillary, wherein the second component is separated from the first component by the air bubble. A sample of interest can be introduced as a first liquid labeled with a detectable particle into a capillary of a capillary array, wherein each capillary of the capillary array comprises at least one wall defining a lumen for retaining the first liquid and the detectable particle, and wherein the at least one wall is coated with a binding material for binding the detectable particle to the at least one wall. The method can further include removing the first liquid from the capillary tube, wherein the bound detectable particle is maintained within the capillary, and introducing a second liquid into the capillary tube.

[0374] The capillary array can include a plurality of individual capillaries comprising at least one outer wall defining a lumen. The outer wall of the capillary can be one or more walls fused together. Similarly, the wall can define a lumen that is cylindrical, square, hexagonal or any other geometric shape so long as the walls form a lumen for retention of a liquid or sample. The capillaries of the capillary array can be held together in close proximity to form a planar structure. The capillaries can be bound together, by being fused (e.g., where the capillaries are made of glass), glued, bonded, or clamped side-by-side. The capillary array can be formed of any number of individual capillaries, for example, a range from 100 to 4,000,000 capillaries. A capillary array can form a microtiter plate having about 100,000 or more individual capillaries bound together.

[0375] Arrays, or “BioChips”

[0376] Nucleic acids or polypeptides of the invention can be immobilized to or applied to an array. Arrays can be used to screen for or monitor libraries of compositions (e.g., small molecules, antibodies, nucleic acids, etc.) for their ability to bind to or modulate the activity of a nucleic acid or a polypeptide of the invention. For example, in one aspect of the invention, a monitored parameter is transcript expression of a polypeptide-encoding (e.g., an enzyme) gene. One or more, or, all the transcripts of a cell can be measured by hybridization of a sample comprising transcripts of the cell, or, nucleic acids representative of or complementary to transcripts of a cell, by hybridization to immobilized nucleic acids on an array, or “biochip.” By using an “array” of nucleic acids on a microchip, some or all of the transcripts of a cell can be simultaneously quantified. Alternatively, arrays comprising genomic nucleic acid can also be used to determine the genotype of a newly engineered strain made by the methods of the invention. “Polypeptide arrays” can also be used to simultaneously quantify a plurality of proteins.

[0377] The present invention can be practiced with any known “array,” also referred to as a “microarray” or “nucleic acid array” or “polypeptide array” or “antibody array” or “biochip,” or variation thereof. Arrays are generically a plurality of “spots” or “target elements,” each target element comprising a defined amount of one or more biological molecules, e.g., oligonucleotides, immobilized onto a defined area of a substrate surface for specific binding to a sample molecule, e.g., mRNA transcripts.

[0378] In practicing the methods of the invention, any known array and/or method of making and using arrays can be incorporated in whole or in part, or variations thereof, as described, for example, in U.S. Pat. Nos. 6,277,628; 6,277,489; 6,261,776; 6,258,606; 6,054,270; 6,048,695; 6,045,996; 6,022,963; 6,013,440; 5,965,452; 5,959,098; 5,856,174; 5,830,645; 5,770,456; 5,632,957; 5,556,752; 5,143,854; 5,807,522; 5,800,992; 5,744,305; 5,700,637; 5,556,752; 5,434,049; see also, e.g., WO 99/51773; WO 99/09217; WO 97/46313; WO 96/17958; see also, e.g., Johnston (1998) Curr. Biol. 8:R171-R174; Schummer (1997) Biotechniques 23:1087-1092; Kern (1997) Biotechniques 23:120-124; Solinas-Toldo (1997) Genes, Chromosomes & Cancer 20:399-407; Bowtell (1999) Nature Genetics Supp. 21:25-32. See also published U.S. patent applications Nos. 20010018642; 20010019827; 20010016322; 20010014449; 20010014448; 20010012537; 20010008765.

### Antibodies and Antibody-Based Screening Methods

[0379] The invention provides isolated or recombinant antibodies that specifically bind to a polypeptide (e.g., an enzyme) of the invention. These antibodies can be used to isolate, identify or quantify the polypeptides of the invention or related polypeptides. These antibodies can be used to inhibit the activity of a polypeptide (e.g., an enzyme) of the invention. These antibodies can be used to isolated polypeptides related to those of the invention, e.g., related polypeptides.

[0380] The antibodies can be used in immunoprecipitation, staining (e.g., FACS), immunoaffinity columns, and the like. If desired, nucleic acid sequences encoding for specific antigens can be generated by immunization followed by isolation of polypeptide or nucleic acid, amplification or cloning and immobilization of polypeptide onto an array of the invention.

[0381] Alternatively, the methods of the invention can be used to modify the structure of an antibody produced by a cell to be modified, e.g., an antibody's affinity can be increased or decreased. Furthermore, the ability to make or modify antibodies can be a phenotype engineered into a cell by the methods of the invention.

[0382] Methods of immunization, producing and isolating antibodies (polyclonal and monoclonal) are known to those of skill in the art and described in the scientific and patent literature, see, e.g., Coligan, CURRENT PROTOCOLS IN IMMUNOLOGY, Wiley/Greene, NY (1991); Stites (eds.) BASIC AND CLINICAL IMMUNOLOGY (7th ed.) Lange Medical Publications, Los Altos, Calif. (“Stites”); Goding, MONOCLONAL ANTIBODIES: PRINCIPLES AND PRACTICE (2d ed.) Academic Press, New York, N.Y. (1986); Kohler (1975) Nature 256:495; Harlow (1988) ANTIBODIES, A LABORATORY MANUAL, Cold Spring Harbor Publications, New York. Antibodies also can be generated in vitro, e.g., using recombinant antibody binding site expressing phage display libraries, in addition to the traditional in vivo methods using animals. See, e.g., Hoogenboom (1997) Trends Biotechnol. 15:62-70; Katz (1997) Annu. Rev. Biophys. Biomol. Struct. 26:27-45.

[0383] The polypeptides can be used to generate antibodies which bind specifically to the polypeptides of the invention. The resulting antibodies may be used in immunoaffinity chromatography procedures to isolate or purify the polypeptide or to determine whether the polypeptide is present in a biological sample. In such procedures, a protein preparation, such as an extract, or a biological sample is contacted with an antibody capable of specifically binding to one of the polypeptides of the invention.

[0384] In immunoaffinity procedures, the antibody is attached to a solid support, such as a bead or other column matrix. The protein preparation is placed in contact with the antibody under conditions in which the antibody specifically binds to one of the polypeptides of the invention. After a wash to remove non-specifically bound proteins, the specifically bound polypeptides are eluted.

[0385] The ability of proteins in a biological sample to bind to the antibody may be determined using any of a variety of procedures familiar to those skilled in the art. For example, binding may be determined by labeling the antibody with a detectable label such as a fluorescent agent, an enzymatic label, or a radioisotope. Alternatively, binding of the antibody to the sample may be detected using a secondary antibody having such a detectable label thereon. Particular assays include ELISA assays, sandwich assays, radioimmunoassays, and Western Blots.

[0386] Polyclonal antibodies generated against the polypeptides of the invention can be obtained by direct injection of the polypeptides into an animal or by administering the polypeptides to an animal, for example, a nonhuman. The antibody so obtained will then bind the polypeptide itself. In this manner, even a sequence encoding only a fragment of the polypeptide can be used to generate antibodies which may bind to the whole native polypeptide. Such antibodies can then be used to isolate the polypeptide from cells expressing that polypeptide.

[0387] For preparation of monoclonal antibodies, any technique which provides antibodies produced by continuous cell line cultures can be used. Examples include the hybridoma technique, the trioma technique, the human B-cell hybridoma technique, and the EBV-hybridoma technique (see, e.g., Cole (1985) in Monoclonal Antibodies and Cancer Therapy, Alan R. Liss, Inc., pp. 77-96).

[0388] Techniques described for the production of single chain antibodies (see, e.g., U.S. Pat. No. 4,946,778) can be adapted to produce single chain antibodies to the polypeptides of the invention. Alternatively, transgenic mice may be used to express humanized antibodies to these polypeptides or fragments thereof.

[0389] Antibodies generated against the polypeptides of the invention may be used in screening for similar polypeptides from other organisms and samples. In such techniques, polypeptides from the organism are contacted with the antibody and those polypeptides which specifically bind the antibody are detected. Any of the procedures described above may be used to detect antibody binding.

### Kits

[0390] The invention provides kits comprising the compositions, e.g., nucleic acids, expression cassettes, vectors, cells, polypeptides (e.g., enzymes) and/or antibodies of the invention. The kits also can contain instructional material teaching the methodologies and industrial uses of the invention, as described herein.

[0391] The invention will be further described with reference to the following examples; however, it is to be understood that the invention is not limited to such examples.

### EXAMPLES

### Example 1

### Blast Program Used for Sequence Identify Profiling

[0392] This example describes an exemplary sequence identity program to determine if a nucleic acid is within the scope of the invention. An NCBI BLAST 2.2.2 program is used, default options to blastp. All default values were used except for the default filtering setting (i.e., all parameters set to default except filtering which is set to OFF); in its place a “-F F” setting is used, which disables filtering. Use of default filtering often results in Karlin-Altschul violations due to short length of sequence. The default values used in this example:
[0393] “Filter for low complexity: ON
[0394] >Word Size: 3
[0395] >Matrix: Blosum62
[0396] >Gap Costs: Existence: 11
[0397] >Extension: 1”

[0398] Other default settings were: filter for low complexity OFF, word size of 3 for protein, BLOSUM62 matrix, gap existence penalty of −11 and a gap extension penalty of −1. The “-W” option was set to default to 0. This means that, if not set, the word size defaults to 3 for proteins and 11 for nucleotides. The settings read:

<<README.bls.txt>>

| | |
|---|---|
| > | -------------------------------------------------------------------------- |
| > | blastall arguments: |
| > | |
| > | -p Program Name [String] |
| > | -d Database [String] |
| > | default = nr |
| > | -i Query File [File In] |
| > | default = stdin |
| > | -e Expectation value (E) [Real] |
| > | default = 10.0 |
| > | -m alignment view options: |
| > | 0 = pairwise, |
| > | 1 = query-anchored showing identities, |
| > | 2 = query-anchored no identities, |
| > | 3 = flat query-anchored, show identities, |
| > | 4 = flat query-anchored, no identities, |
| > | 5 = query-anchored no identities and blunt ends, |
| > | 6 = flat query-anchored, no identities and blunt ends, |
| > | 7 = XML Blast output, |
| > | 8 = tabular, |
| > | 9 tabular with comment lines [Integer] |
| > | default = 0 |
| > | -o BLAST report Output File [File Out] Optional |
| > | default = stdout |
| > | -F Filter query sequence (DUST with blastn, SEG with others) |
| | [String] |
| > | default = T |
| > | -G Cost to open a gap (zero invokes default behavior) [Integer] |
| > | default = 0 |
| > | -E Cost to extend a gap (zero invokes default behavior) [Integer] |
| > | default = 0 |
| > | -X X dropoff value for gapped alignment (in bits) (zero invokes |
| > | default behavior) [Integer] |
| > | default = 0 |
| > | -I Show GI's in deflines [T/F] |
| > | default = F |
| > | -q Penalty for a nucleotide mismatch (blastn only) [Integer] |
| > | default = −3 |
| > | -r Reward for a nucleotide match (blastn only) [Integer] |
| > | default = 1 |
| > | -v Number of database sequences to show one-line descriptions for |
| | (V) |
| > | [Integer] |
| > | default = 500 |
| > | -b Number of database sequence to show alignments for (B) |
| | [Integer] |
| > | default = 250 |
| > | -f Threshold for extending hits, default if zero [Integer] |
| > | default = 0 |
| > | -g Perform gapped alignment (not available with tblastx) [T/F] |
| > | default = T |
| > | -Q Query Genetic code to use [Integer] |
| > | default = 1 |
| > | -D DB Genetic code (for tblast[nx] only) [Integer] |
| > | default = 1 |
| > | -a Number of processors to use [Integer] |
| > | default = 1 |
| > | -O SeqAlign file [File Out] Optional |
| > | -J Believe the query defline [T/F] |
| > | default = F |
| > | -M Matrix [String] |
| > | default = BLOSUM62 |
| > | -W Word size, default if zero [Integer] |
| > | default = 0 |
| > | -z Effective length of the database (use zero for the real size) |
| > | [String] |
| > | default = 0 |
| > | -K Number of best hits from a region to keep (off by default, if |
| > | used a value of 100 is recommended) [Integer] |
| > | default = 0 |
| > | -P 0 for multiple hits 1-pass, 1 for single hit 1-pass, 2 for 2-pass |
| > | [Integer] |
| > | default = 0 |
| > | -Y Effective length of the search space (use zero for the real size) |
| > | [Real] |
| > | default = 0 |
| > | -S Query strands to search against database (for blast[nx], and |
| > | tblastx). 3 is both, 1 is top, 2 is bottom [Integer] |
| > | default = 3 |
| > | -T Produce HTML output [T/F] |
| > | default = F |
| > | -l Restrict search of database to list of GI's [String] Optional |
| > | -U Use lower case filtering of FASTA sequence [T/F] Optional |
| > | default = F |
| > | -y Dropoff (X) for blast extensions in bits (0.0 invokes default |
| > | behavior) [Real] |
| > | default = 0.0 |
| > | -Z X dropoff value for final gapped alignment (in bits) [Integer] |
| > | default = 0 |
| > | -R PSI-TBLASTN checkpoint file [File In] Optional |
| > | -n MegaBlast search [T/F] |
| > | default = F |
| > | -L Location on query sequence [String] Optional |
| > | -A Multiple Hits window size (zero for single hit algorithm) |
| | [Integer] |
| > | default = 40 |

### Example 2

### Isolation and Characterization of the Hyperthermophile Nanoarchaeum equitans and its Genome

[0399] This example describes the isolation and characterization of the hyperthermophile Nanoarchaeum equitans of the invention and its genome (SEQ ID NO:1).

[0400] To investigate hot submarine vent microbial communities, experiments were carried out to cultivate hyperthermophiles from samples of originally hot rocks and gravel taken at the Kolbeinsey ridge, north of Iceland, see, e.g., Fricke (1989) “Hydrothermal vent communities at the shallow subpolar mid-Atlantic ridge.” Mar. Biol. 102, 425-429. By anaerobic incubation at 90° C. in the presence of S, H2 and CO₂, a new autotrophic sulphur-reducing species of the archaeal genus Ignicoccus could be enriched. In contrast to known species, several large spherical Ignicoccus cells were covered by very tiny cocci which could be stained by DNA-specific fluorescence microscopy, using DAPI, see, e.g., Huber (1985) Syst. Appl. Microbiol. 6:105-106. Few such tiny cocci existed in the free state. These tiny cocci could be physically isolated either by using ‘optical tweezers’ (see, e.g., Ashkin (1987) Nature 330:769-771; Huber (1995) Nature 376:57-58; or, or by ultrafiltration, pore width, 0.45 mm. All attempts to grow these organisms in pure culture employing various inorganic and organic energy sources failed. However, isolation of a combination of a tiny coccus attached to an Ignicoccus sphere after incubation under enrichment conditions, resulted in a defined co-culture in which about half of the Ignicoccus cells appeared to be colonized by the tiny cocci. The final density of both the tiny cocci and the Ignicoccus cells was about 3×10⁷ cells ml⁻¹ resulting in about two tiny cocci per Ignicoccus cell on average. The purified co-culture was used in all further investigations.

[0401] Cloning of single Ignicoccus cells gave rise to cultures which never contained tiny cocci. By electron microscopy, a close attachment of the tiny cocci to the surface of the Ignicoccus cells became evident. The tiny cocci consistently exhibited a cell diameter of about 400 nm. In contrast to Ignicoccus, they were covered by a regular surface layer (S-layer) with six-fold symmetry and a lattice constant of 15 nm. Ultra-thin sections showed the presence of cytoplasmic membranes inside the tiny cocci and the Ignicoccus cells. No specific attachment structures could be detected at the sites of contact which suggested a loose connection of the tiny cocci with the Ignicoccus cells. In line with this assumption, the tiny cocci could be removed by mild sonification (30W).

[0402] The phylogenetic relationships of the tiny cocci were investigated by ss rRNA sequence comparisons (see, e.g., Woese (1987) Microbiol. Rev. 51:221-271). Total DNA of the co-culture was extracted and ss rRNA genes were PCR-amplified using primers addressed to highly conserved gene sections. Surprisingly, however, only the Ignicoccus ss rRNA gene sequence was amplified even when primers considered general for all Archaea as well as for all organisms (‘universal’) had been employed. More directly, the co-culture-derived DNA for ss rRNA genes was examined by Southern blot hybridization (see, e.g., Sambrook, J. Molecular cloning: a laboratory manual. (Cold Spring Harbor Laboratory Press, New York, 1989), taking advantage of the generally high sequence homology of all ss rRNA genes. Two different hybridization signals became visible, indicating two non-identical ss rRNA genes. As a control, DNA isolated from the separate Ignicoccus sp. by the same procedure yielded only one hybridization signal which was identical with one from the mixed culture. Therefore, the tiny cocci must have given rise to the second hybridization signal, indicating that they hold a single-stranded (ss)rRNA gene different from Ignicoccus.

[0403] The corresponding DNA fragment was cloned and sequenced. Its sequence turned out to be unique, harboring many base exchanges even in the so-called ‘highly conserved regions’ that are usually employed as primer targets for ss rDNA PCR. This explains our initial failure to amplify this gene by PCR. Comparison of the new single-stranded (ss)rRNA sequence with those of other microorganisms established the tiny cocci as previously unknown members of the archaeal domain indicated by sequence identities of 0.69 to 0.81 with the Archaea in contrast to sequence identities of only 0.59 to 0.70 with bacterial species.

[0404] The secondary structure of the ss rRNA sequence conformed to the standard two-dimensional structural model (see, e.g., Woese (1987) supra). It exhibited features characteristic of Archaea, especially helices numbers 17, 18, 36 and 47. The sequence identities to the Crenarchaeota (0.73-0.81), the Euryarchaeota (0.69-0.81), and the ‘Korarchaeota’ (0.73-0.75) were in the same range as those between these three known phyla of Archaea (0.69-0.83). Therefore, the tiny cocci represent a new archaeal phylum. On the basis of its extremely small cell size, we named it ‘Nanoarchaeota’ (the dwarf archaea) and the corresponding species ‘Nanoarchaeum equitans’ (riding the fire sphere).

[0405] In ss rRNA phylogenetic trees that are founded on the maximum parsimony, distance matrix, and maximum likelihood methods (see, e.g., Ludwig (1998) supra), ‘N. equitans’ represents an isolated, very deeply branching lineage. However, because of its unique ss rRNA, a large variation of its branching point, challenged by insignificant bootstrap values below 50%, was observed. Therefore, the determination of the accurate branching position of the ‘Nanoarchaeota’ must await the discovery of further members of this group. Owing to their great divergences in ss rRNA, in contrast to the Ignicoccus host, cells of the ‘Nanoarchaeota’ did not stain by fluorescence in situ hybridization using ss rRNA-targeted oligonucleotide probes directed against Crenarchaeota and Euryarchaeota). However, after redesigning these oligonucleotide probes on the basis of the ‘Nanoarchaeota’ sequence (SEQ ID NO:1), the tiny cocci exhibited a bright fluorescence, indicating that they possessed ribosomal RNA harboring the target sequence.

[0406] Few physiological properties of the ‘Nanoarchaeum’ strain are known thus far. Isolated cells did not grow on cell homogenates of Ignicoccus sp., so they require an actively growing Ignicoccus culture. Within pure cultures of Ignicoccus, ‘Nanoarchaeum’ cells locally separated by dialysis bags were unable to propagate. Therefore, a direct cell-cell contact with the host appears to be a prerequisite for growth. No negative influence on Ignicoccus, such as slower growth, lower final cell density, or increased cell lysis, could be observed in the co-culture compared to the pure culture, rendering a parasitic mode of living of ‘Nanoarchaeum’ unlikely. Therefore, the organism is most probably symbiotic. So far, archaeal symbionts are only known at mesophilic temperatures in association with eukaryotes (see, e.g., Preston (1996) Proc. Natl. Acad. Sci. USA 93, 6241-6246) and bacteria (see, e.g., Boetius (2000) Nature 407:623-626). Co-cultures of ‘Nanoarchaeum’ grew within the same temperature range (70° C. to 98° C.) as its host. During mass-culturing in a 300-litre enamel-protected fermentor3, final cell concentrations of ‘Nanoarchaeum’ could be improved about ten-fold by an increased gassing rate (20 liter/min; H₂:CO₂=80:20), while that of Ignicoccus remained unchanged. This procedure improved hydrogen supply and efficiently removed H₂S, the main metabolic end product of Ignicoccus. During the late exponential growth phase, about 80% of the ‘Nanoarchaeum’ cells detached from their host cells and occurred freely in suspension. They could be collected (for example, 1.5 g wet weight) by high-speed centrifugation, after removal of the Ignicoccus cells at low speed. By this method, cell masses of ‘Nanoarchaeum’ became available for biochemical and molecular investigations.

[0407] A first analysis of its genome size by adding up the sizes of restriction fragments determined after pulse field gel electrophoresis resulted in only 500 kilobases (kb), one of the smallest genomes of all prokaryotes known so far. With its tiny cell and genome size, ‘Nanoarchaeum’ resembles an intermediate between the smallest living organisms like Mycoplasma genitalium (see, e.g., Fraser (1995) Science 270:397-403) and big viruses like the pox virus and Chlorella virus CVK2 (see, e.g., Rohozinski (1989) Virology 168:363-369; Murphy, F. A. et al. (eds) Virus Taxonomy: Sixth Report of the International Committee on Taxonomy of Viruses, Springer, Vienna/New York, 1995. Nature Vol. 417. 2 MAY 2002), and is close to the theoretical minimum genome size calculated for a living being (see, e.g., Hutchinson (1999) Science 286:2165-2169).

[0408] Small cell size and reduced genomes are common features observed in many symbiotic or parasitic bacteria, but have so far not been reported for Archaea or hyperthermophiles. No final conclusions can be drawn about a primitive or derived state of evolution of ‘Nanoarchaeum’. However, its high growth temperature and anaerobic mode of life correlates with probable early environmental conditions which suggest that the ‘Nanoarchaeota’ are possibly still a primitive form of microbial life.

[0409] Cultivation conditions: Cultures were grown anaerobically in serum bottles as described by Huber (2000) Int. J. Syst. Evol. Microbiol. 50:2093-2100. Mass culturing was carried out in the same medium in a 300-litre enamel-protected fermentor (gassing rate routinely 2 liter/min H₂:CO₂=80:20). Cell mixtures were collected by centrifugation (9,000 r.p.m.; 30 min using rotor GS3 (Sorvall)) and resuspended in sulphur-free culture medium. The Ignicoccus cells were removed by centrifugation at 2,000 r.p.m. for 30 min using rotor SS34 (Sorvall). Then the ‘Nanoarchaeum’ cells were precipitated at 15,000 r.p.m. for 15 min using rotor SS34. Axenic cultivation of ‘Nanoarchaeum equitans’ was tested autotrophically in the presence of H₂:CO₂ (80:20) and elemental sulphur, nitrate, nitrite, and sulphate (each 0.1% w/v) as possible electron acceptors, and heterotrophically on single and complex organic nutrients such as sugars, amino acids, yeast extract, peptone, bacterial and archaeal (for example, from Ignicoccus) cell extracts (each 0.1% w/v; gas phase: H₂:CO₂=80:20 and N₂:CO₂=80:20).

[0410] Light and electron microscopy: Phase-contrast and electron microscopy were carried out as described by Huber (2000) supra. Confocal image series were recorded on a LEICA TCS SP2 laser scanning microscope using the laser wavelengths 488 nm (argon) and 543 nm (HeNe) excitation. Fluorescence in situ hybridization (FISH) was performed as described15. CY3- and rhodamine-green-labeled oligonucleotides were obtained from Metabion (Germany).

[0411] Southern blot experiments: DNAs were digested with restriction endonucleases EcoRI and HindIII. The fragments were separated by electrophoresis (1% Seakem ME agarose) and transferred to a positively charged nylon membrane by Southern blot13. The membrane was hybridized with a digoxigenine-labelled single-stranded DNA fragment of an archaeal ss rRNA gene (Metallosphaera sedula; length 600 nucleotides, position 519 to 1119, Escherichia coli).

[0412] Estimation of the genome size: For pulse field gel electrophoresis ‘Nanoarchaeum’ cells were embedded in 100-ml agarose plugs (0.8% Incert agarose, FMC; final concentration: 3£108 cells per plug). After cell lysis according to lysis method ‘three’ (see, e.g., Baumann (1998) Extremophiles 2:101-108) genomic DNA was digested using the restriction enzymes AscI, BssHII, NotI, or SacII (each 100 units, 18 h). The restriction fragments were separated as described by Baumann (1998) supra.

[0413] Small subunit rDNA sequence analysis: The nearly complete ss rRNA gene of the new Ignicoccus species was PCR-amplified and sequenced as described by Huber (2000) supra. To obtain the ss rRNA gene of ‘N. equitans’, genomic DNA of the co-culture was digested with EcoRI and separated as described (see ‘Southern blot’). DNA fragments of the correct size, identified by Southern blot, were extracted, cloned into a plasmid (pBluescript SK(2)) and amplified in Escherichia coli (strain Dh5a). These inserts were sequenced by primer walking. The new sequences were aligned with approximately 10,000 homologous sequences available in public databases using the automatic alignment tools of the ARB package (Technical University of Munich, Del.). Distance matrix (Jukes-Cantor correction), maximum parsimony, and maximum likelihood (fastDNAml) methods were used for tree reconstruction as implemented in the ARB package. The secondary structure of the ss rRNA of ‘N. equitans’ was displayed using the program RnaViz28.

[0414] Library Construction and DNA Sequencing: N. equitans was grown in a 300 liter fermentor in a co-culture with Ignicoccus sp. and the N. equitans cells were purified from Ignicoccus as described above. The cell pellet was lysed by enzymatic and chemical digestion, followed by the isolation and purification of genomic DNA, as described by Zhou (1996) Appl. Environ. Microbiol. 62:316; Robertson (1996) Soc. Indust. Microbiol. News 46:3; Short (1997) Nat. Biotechnol. 15:1322. Genomic DNA was either digested with restriction enzymes or sheared to provide clonable fragments. Two plasmid libraries were made by subcloning randomly sheared fragments of this DNA into a high-copy number vector (˜2.8 kbp library) or low-copy number vector (˜6.3 kbp library). DNA sequence was obtained from both ends of the plasmid inserts to create ‘mate-pairs’—a pair of reads from a single clone that should be adjacent to one another in the genome. Library construction, DNA sequencing and assembly methods were essentially as described by Adams (2000) Science 287:2185; Myers (2000) Science 287:2196; Venter (2001) Science 291:1304. The assembly procedures resulted in a single scaffold of four contigs comprising 489,082 base pairs. The gaps between the four contigs were then sequenced with 10× coverage which resulted in a single circular sequence. A set of computational methods was applied to the N. equitans genome of the invention (SEQ ID NO:1). Two gene prediction programs, Glimmer (see, e.g., Delcher (1999) Nucleic Acids Res. 27:4636) and Critica (see, e.g., Badger (1999) Mol. Biol. Evol. 16:4512), were run on the assembled sequences. The results of the two programs were merged to generate a unique set of genes. When the two programs selected different start codons for genes with the same stop codon, the longer gene was included in the set for further analysis. This unique set of genes was then translated into amino acid sequences and subjected to BlastP searches (with an E-value cutoff of 1e-10) against the non-redundant amino acid (nraa) protein database, as described by the NCBI, NLM, NIH website. The predicted protein set was then searched against the InterPro database release 3.1 (see, e.g., Apweiler (2001) Nucleic Acids Res. 29, 37) using software modified from the original ipr scan programs provided by InterPro (The European Bioinformatics Institute (EBI), European Molecular Biology Laboratory (EMBL), Cambridge, UK). The predicted protein set was also searched against the NCBI Clusters of Othologous Groups (COGs) database mid-2001 update (see, e.g., Tatusov (2001) Nucleic Acids Res. 29:22). Lastly, gene family analysis was performed using the NCBI blast clust program. tRNA genes were identified by the tRNA scan-SE program (see, e.g., Lowe (1997) Nucleic Acids Res. 25:955) and rRNAs were identified by searching the genomic sequences against a set of known rRNAs with BlastN and verified by profile alignment to the multiple alignments from known rRNA sequences. Protein sets from the main scaffold and small scaffolds were compared to the protein sequences from all finished genomes deposited in the GenBank using the blast program.

[0415] Preparation of alanyl-tRNA synthetases and aminoacylation assay: The methods were adapted from Ahel et al., as described in Ahel (2002) J. Biol. Chem. 277:34743. N. equitans alaS1 (NEQ547), N. equitans alaS2 (NEQ211), and M. jannaschii alaS genes were PCR amplified from the respective genomic DNA and cloned into the pCR2.1 TOPO vector. Correct sequences were subsequently re-cloned into pET11a (Invitrogen) for expression of the proteins in the E. coli BL21-Codon Plus (DE3)-RIL strain. Cultures were grown at 37° C. in Luria-Bertani medium supplemented with 100 μg/ml ampicillin and 34 μg/ml chloramphenicol. Expression of the recombinant proteins was induced for 3 hours (h) at 30° C. by addition of 1 mM isopropyl-1-thio-D-galactopyranoside before cell harvesting. Cells were resuspended in buffer containing 50 mM Tris-HCl, pH 7.5, and 300 mM NaCl, and broken by sonication. S-100 fractions were extensively flocculated at 70° C. for 45 min, and then centrifuged for 30 min at 20,000×g. Supernatants were collected and stored at 4° C. before use in aminoacylation assays.

[0416] Aminoacylation was performed in a 0.1 ml reaction at 70° C. in 50 mM HEPES, pH 7.2, 50 mM KCl, 10 mM ATP, 50 μM [³H] alanine (52 Ci/ml), 15 mM MgCl₂ and 5 mM 2-mercaptoethanol, unfractionated M. jannaschii tRNA (3 mg per ml of reaction) and the different alanyl-tRNA synthetases (100 nM). Aliquots of 20 μl were removed at the time intervals indicated in FIG. 5 and radioactivity measured as described. FIG. 5 summarizes data from the alanylation of unfractionated M. jannaschii tRNA by alanyl-tRNA synthetase. The purification and aminoacylation procedures were adapted from Ahel (2002) J. Biol. Chem. 277:34743. The enzymes used are: M. jannaschii AlaRS (filled squares), N. equitans AlaRS1—N-terminal part (open circles), N. equitans AlaRS2—C-terminal part (filled triangles), N. equitans AlaRS1+AlaRS2 (filled circles).

[0417] Phylogenetic Analysis: A concatenated alignment of 35 ribosomal proteins was obtained from Matte-Tailliez (see e.g., Matte-Tailliez (2002) Mol. Biol. Evol. 13:631). To this alignment we added the N. equitans, Methanopyrus kandleri and the eukaryotic outgroup sequences (Arabidopsis thaliana and Saccharomyces cerevisiae). The alignment was then recalculated with ClustalW (see, e.g., Thompson (1994) Nucleic Acids Res. 22:4673) and optimized by hand using BioEdit (Hall (1999) Nucleic Acids Symp. Ser. 41:95; North Carolina State University, Raleigh, N.C.). The program RASA (University of Massachusetts, Lowell, Mass.) was used to evaluate the alignment for the presence of long branches (see, e.g., Lyons-Weiler (1996) Mol. Biol. Evol. 13:749). Maximum likelihood analysis was performed with Protml from PHYLIP v. 3.6a2.3 (University of Washington, Seattle, Wash.). Parameters used were: the Jones-Taylor-Thornton model, rate variation among sites, constant rate of change, global rearrangements, randomized input order of sequences with three jumbles. One hundred bootstrap resamplings were performed to assess the support for individual branches. Bayseian analysis of the dataset was done with the MRBAYES software (University of California, San Diego, Calif.; Huelsenbeck (2001) Bioinformatics 17:754). Four simultaneous MCMC chains were run for two hundred thousand generations after the convergence of the likelihood values, using the default settings of the program. A 50% majority-rule consensus tree was generated based on the resulted 2000 trees and the bipartition values (percentage representation of a particular clade) were recorded at the nodes. The program PAUP 4.*™ (see, e.g., Swafford (1996) PAUP*. Sinauer Associates, Sunderland, Mass.) was used for the parsimony analysis. The alignment was sampled for 500 bootstrap replicates. Each bootstrap replicate was analyzed with ten random addition sequence replicates with TBR branch swapping and equal weighting for all sites.

The application's sequence listing, which the Patent Office published only in electronic form, follows.

SEQUENCE LISTING (1073 sequences)

SEQ ID NO: 1 - DNA, 490885 bp, Nanoarchaeum equitans
tctcgcagagttcttttttgtattaacaaacccaaaacccatagaatttaatgaacccaaaccgcaatcgtacaaaaatttgtaaaattctctttcttctttgtctaattttctataaacatttaactctttccataatgtgcctatatatactgcttcccctctgttaattcttattcttattgatactgttttatagaaagtaaaaccttcgaatattgcttcttcaaaataaaagttcttcccacagaaattattatattttcttaagctttgctcttttaggtctcgcaaccaattagaaaaagcgctaaaactcttatttctaaaatcgtaatacctatcttttacatctataattttccatccatctttgatttggtttaaactaatctctatgggttcttctaaaatgggctctttcttttttattagattatactttttcaattcttccaatcgcttaacaaataccttatagtatttgtccccttttaatattactattttgccttcccttaatactataggagttatagtaacccaaggaaatcttaattttggatcgaatttttttgttttccttaattggaattgagccaaaccaatagttattatatctaaatcttttattttattatgcaaaacctctataaaccttttatcgggcgaagatatgattaaataatacctcttattctctattatgtctttttttgggattaaggtaaaattaaaatatttctctttcttccaattatgtaaccaagagtattcggtattttttaatatattataaatgaaaccttgtattagatagttagataattgttttttatctatgctatttagggctttaagttctaatagcaatcgcatttaatgaaaaagccccaaccctataaagatgaagagatatattctattttagaagagcccgtaaaacaatggtttaaagagaaatacaaaacattcactcccccacaaaggtatgcaataatggaaatacataaaaggaacaatgttttaatttcttcccccacaggttcgggaaaaacgttagcagcgtttttagctataataaatgaattaataaagttatctcataaaggaaaattagaaaatagagtttatgccatttatgtttctccattaagaagtttaaataacgatgtaaagaaaaacttagaaactccattaaaagaaataaaagaaaaagcgaaagagcttaactattatattggagatattagaatcgctgtaagaactagtgatacaaaagaatcggaaaaagcaaaaatgcttaagcaacctccacatattttgattaccactcctgaatctttagctataatattatcaacaaaaaaatttagagaacatataaagaaagtggaatttgttgttgtggatgaaatacatgctttagcagagtctaaaaggggaacacatttagctttaagcttagagagattaaactatctaaccaatttcgttagaattgggctttcagcaacaatccatccattagaggaagtggcaaaatttttgtttggttatgaaaatgggaaaccaagggaaggctatataatagatgtttctttcgaaaaacctatagaaatacaagtatatagccctgtggacgatataatatatagctctcaagaagagttaatgcggaacctatacaaatttattggagagcaattgaaaaaatatagaactatattaatatttaccaataccagacatggtgcagaaagtgtggcataccatttgaaaaaagcttttcccgatttagaaaaatatattgcggtgcaccattcctctttgtctagagaagaaagattagagatagaagaaaaactaaaaaggggcgaattaagaatagtatgcacttctacttctttagaactaggaatagatataggtacaatagatttagttatacaaataggttctcctaagagtgttaatagggcattacaaagaattggtagggctggccatagattagatgaaaagagcaaaggtattctaattggcttagatagagacgaactattggaaaacacaataataaaatatagcgccgacaatagaaggttagacagaattcatattccaactaatgctttagatgtattggcccaacatatagtagggatgggcttagagaaagaatgggatctaaaggaagcatacaatttaataagaaatgcttatccctatagaaatctatcgtgggacgattatattaatactataaaatatttggctggagagtatacaaaattagaacataaaaaagtatatgctaaaataattttgagggacaataaatttaaaactaagggtagtgtaagagctatttattttatgaatataggcactatccccgaagaaacaaaaatagcggtatatactttagataataaaagaataggttatgtagaggaagaatttgtagaaaaactagtaaaaggggacatattcgttttggcaggaaaaacttatgaatttctatatagtaagggcaataaaatatatgttagacctgtaaaaggggtaaaccccacaataccccattggttttctgagatgttaccattaagttatgatttagcgatagaaatacaaaaatttagagaggaaatagccaaaaaattagagagagaacctttggactaaactttctaagattttgctttttattattagttggccatccttttcttcaataacatctttataaccaaggttttgagccaatttttctaaaaattcttttctatccaatttctttatatcctctataataatttttatttttttccctgccaatggatggttaaaatccactaaaactctatcactattaacagttaaaactattccggttttgccatccatattaactactaacccaggaattggtattaatctattttctctaaaaacttttgcaggcactatcactatatttttcggatttctttttccgaaaggattattattttcatcgaattctaattctattttttctccttctttgccaatcaaattattctcaatttctttattatataacccagagcccagctttgttaaaatcttatcctctaacaaaagcttttctccttcgtaaatttttattttcccctctatataatcgccctcttttaacatcgccttactaataaaaaatttttaaaagcttataatatattactctgcggcggccaggggggaaacccccaggtccccggttcaaatccgggccccgcgtctatatgtctacaataaattctataacatatttcgccctcccttcccttttaatatctaaaccatgccatgttacagcttttacttcttttttaaaattatgcttctccatagaataaggctcccccatagcatatccttttaaataccattgctttttgccattctttattcttctcaaattttttattttaaaaaatccaaaagctatcttttttatatagaattgggccaatatattagataaccaatcatataaaacttcgctagcgtaatcgccatagctttctatttctattttttcgctatcgctttctactttatctacatcatatattagatgtaacatcccagctgcggcagagtaaaatgcatgtttcaaattcctaccatatgcttttatcattacatcagcggtatggtctaaatattcaaaacaataatccctaatgcaaatcattgcttttctatgacttctactttaaacacttttagatagggtttaatatcccgaccaaacattttatttagctcttcatattctttttttggtaaaacgaatttgttatctaatttaacccagcgctttggcaattcgatagataatctctctaatatgtctttcctagttaggttctcttttattgcctcttcaatagttttgttttcgaatttgacttttaataatattgatattattctgttaaacctatctggtacccctttggttttgccatagaattcgattctttttctaggaaattctttaaacaattctttagtccatggtctattttgtcccaaatctactatacccccaattagaaatatattgttctcttttatgtccttttcagttaatatttcatcggcatttggatctaaagcgatgccatttaatggatagtctaatcttaaaattttattgttccccaatttatgggaaataaaattaaataactctctattagctactaaagctaaatgcctatcccatagatattttcttacttctattaaactggctagtatctcttttattattctgcgcttttctttttcggtatgcctattatagtaacgcaaatctattataaataatgggtatttgggcaaatttaattctggttttaccccttgtttggataaaatagcatcactatagtaagggcctttcctatttaatagatagaattccccctctttgtataaagggatgcctccctcttttttgaaatctattctataatcattaagcaatatttctaataacaccgattggaatggatttaaataagacctaagttttcttctatttaaatgcaaaaaatatatattgtgctctttaagccattctaacaaatatttatagagcatttatttactattaaatgcaatataaagttttttgctactataggccattcctagctataattaagaataacaaaattgtagaagtgaaaactacaaataaaaaatgcgagatctctttggataaactattagagatgtatgaacccaatttgtattatccttataatttattgtatgaatatatgaaagagaaaaggctatatttttacaaagagctagctaacttattaaaaatgcatcctagaaaaataggcctaatactgaaaaagaatcctttgcctataataataccttgccatagagttattaaatctaactataatattgggggttacaaatttggaatagaattgaaaaaatatctattgattcaagaaaaactttgtagcgaaataaaaaatggctattgcaaacccaaagcctagggttagcaatattagttctttcttatccttgttaacaaatgggtaaataaacatcaaagaaataattacaaagggaaatatttttccttctatcgataaaaataaacccaaaccaattaaaaaagagtttagcaataggttatctttgtttatatttatgaatggaaatattattaacaaaggtattagcataaaaatatgcgattcatattcgtctatataataaaaaaacccttgcaaatcccattgcccttttgttaggctatcaaatattaaatggtaaaccaacaaaatagaaaaaagcataaccatattaattactacaaaatcatctatatcttttgatttggataataaataatagtttaataaaataaatggaaataataaagcgaaaaagctattgtatataaaaagaattagggaaaaaattataaaaactatcgctactgcttccttttgtatttccatgcccaagaatattttctccattttttagattttccaaatccacaatgggcgcaataaccttttcttacattgaatgttcttctaccgcatcgcctacaagtaacatgagtatatttatttttctttccaaagtgcgcctcgctcattagtataggttaagcaacccatttataaaggttcgccattagcattataaagtgaaagtctatttcgaaagctatggttgcacactaaataagagagacactttatatatgcaagcacaaatagaaaatactacaaacaatttagaagaagcggatgttgttgttataaatagttgtatagtaaaacaaccaaccgaaactaaaatattgtatagaataaaccaactaaagaagatgggcaaaaaaattgttttaactggttgtatggttagtgaaccatatttaaaatacaaagaattacaggacatatctttagtaaacatatacaaccaagatagaattaaagaagcaatagagagaacatacaaaggagaaagagttttgtttttagaaaagaaaaaaatatacaaagaatttgctaggcctttatctaaagctagggcaataatacaaatccaagaaggttgtttatggagatgcacttattgcggtacaaagctagcgagatcgatgttttattcttatccaccaaagttaataaaaagagaaatagaggaaaaactcaaacaaggaataaaaatattttatttaacgggccctgatactgccacttatggaaaagacattaactatagcttggcggatttgctaaaagatttaatagaaatagaaggcgatttttatataagagtgggtatggctaacccaacatttttcttagagcaaatagatgaactaatagatgtgtttaaatcaaacaaaatatttaagttcttccatttaccagtacaaagtgggtctaataaagtgctaaaagatatgaataggccctatactatagaggaatataaagagcttatttataagctaagaaaacattttcctttagctacttacgttacagatataattgtaggctatccaactgaaacggaagaagattttgaacaaacattagaattggttagggaaataaaatttgatggcataaacataagcagattttggaggaggcccggaacaatagcttggaatttgaaacaattggatccagaaatagttactaatagagtaaaaaggttgaaagaagtattcttacaaggagcgtatgaaagaaataagctatggctaaactgggaaggcgaagctataattgaagaaaaaggcaaaaacaatacatggattgccaaaaacgaaatgtataaacaaataatagtgaaaggcaattatgaagaagggcaaaaaattaaggtaaaaataaaaaaagctagagctattgatttaatcgcctagtgggcccggcgggattcgaacccgcgacctcccggttatcagccgggcgctctgccaggctgagccacgggcccagagctagtataagcaacaatttaaaacttttatatttggaaaaatattactttaatatctcttttggtttgctttattttctctttcggcttataatatacaatatagtccccatttaattgttcatatttttctactccatattgtttgtttagtttttccgataataaaacggctaaatcctcaaaataatcataagtcccacaagtaaaacagatatgccctgaaaatagcactattatagtgtcgtcctttatttctaataatttgcaattggctttatgcaatctattaaactcttctataacttgttctatctctttcatactatagtataaaagcctactcctcctccttttgccacattcaatatatgatctttggaaaatcttaataaaatattgccaaaccttaattttttgtcgaaaaacgcataagggttaaaatcataataaaatataccttttttgattttatcatctatatctaaatatgaaatctctctttttggtatttctataaactcttggtatacacagttatctcttttttcgaaatagacttctccatgtgtgccaaaatatggtttacacacatattttttgaattctggtttaaaagaggtttttgctacaatatctaaagcccaatctacctctttatctaaaaaggccaagttagctttgtttcccattattgtaaatagtatatcgttaatattttgtttttctaaccaataatctagttttttaactttatctatatctatggcccttctatatattggataaattctatactttttgttctcatagaactcgctttccttaatatatgggccttttaataatttgctttccaaatagtattcgtcaacgaacaaataattatcgggataaactataatcgcaggtttatcgaataaacttaaaaatggctctctattatatcgaggttcgccaacaaaatcaaaaagctcagaaaaccatttagatgtaatatctaattgtattactccttccacagcatcagcgttaatttctatgagcttaaaattaatcatatcaaatctaattattcccttaaatttgtaattgtagttctcataaatttttagatataaattttttctaaactcgtctataggatagccctttaaactattatccaaaaactcaaatactatttcctttattcttaaaaatatggcatttagcttttcctctatctcttttagtttttccttctctataaaaaattcagtaactgctaaaggtattcgatatttgcctttagttattggatatgcttcttttacaaactctataattccttctcggttttccataacccatgtaaagtacaatagcttatagcaattagtttacctttcccttctagtttagcataaactatcgcttttggttcggtataattattgtattctccatgcgctttaaattctattctcgctatatgggttggctcttttccctctggttcgaaatataagtctacccattgtatatggtgggaaggctcattgggatgtttcacttctttgccaacttctattgtaattttatataattcgccctctttttctatctctattataggggaatgttttggattgtattcggttttgatcattgttataactaagtgtgatatttaaaggggaaaaaactgaaaattaatgaaaaaaattgcggtttttgttccccattctatatacccaaattttggtggggcggttagatgttatgagttattaaaaagacttgacaagcgattccgtttaataatattctccttatcagaaaaatttgaaataaaacgaatatgggataactccattttaattgagtaccctaaaggaatattgcctactataatgttttttcgtattgttaaacaatttaatcccgatttggttatagttgagtatacatctatctattctttcttcccaaccatcattggtaagttatatgggaaacctgttatattggatgcgcacaatgtagaatatgtatttaaaaggggtaggctaccctcctttttattacctttgtttttcttgaatgaactattattgtctaagttgtctgacatattattagtagtatctaaacttgataaaaagatatttgaacttttatataacatagataggattgttgttatacccaatggtgtaaaccccgacaggttttctaataatgaaacaaaaagtaattgtgccgtatttcatggagattacaattatgatgccaatagggaagctataaactttatattagatctggcaaaggaattaccagaaatagaatttgtaatctttggtagagatacgaataaagtaaaaccaaaatctaaaaatgtaaaagtgttaggagaagttgcatatgaagagataccaagaattttacaaaaatgtaaaattgcagtagtccctctatttagagggtctggcactagtttaaaaatcctagaatacctttcagcaggtttaacgattgttgctaccaaaatagctgtccgaggtttgcctttaaaagaaggtacacattactataaagctgaaacagaagaagaatttgtagaaaaaataaaatatgcattagaacacccaactaagcaatatagtgttatagaattttcctgggacaatataagtaaaaaactaataaaaactatagaaaaagtaataaatgtccgtactaaacaagattaaaacagtattaactacccctataagagatatcgaaggaagactaaaaaaaggttattattttttgagcctagagatatccttaacctatttgtgtaattcgcgttgtaccttttgcaatatatggaaaatttataaggaaaaccccaatttattgaaaaaagaactttctaaagaggagtggattgattttctatcaaaaaataataaatatctagcatgggtctctcttacagggggagaacccttactaaaagatggggcaatagatattattaactatttgctgaacaatggcaaaaatgttgaaataacgactaatgcaatagcatacaaatatataataggaaacctagaaaaaataaaaaataaaaagaaattgtttgttggtgtgtctcttgatggacccaaggaaatacatgataagcttagaggagttccgggaaattttgacaatgccataaagctattggaatggttagaacaaaacaattttaattttggaatctctgtaacaatttcataccaaaatgctccatatatcatggaattgtttgaatttttagaaaaaaggggctggattgataaagtatcctttagagtagctactatatcccaatattatagaaatgagcaaaaaatagttataacaaaagagcatatacagtctataaaagaggcattattaaaaatttacaaaggatatcctcgttttaggaaggacaaattctatttcggaaatctattatttttagaaggtaagatagattttgattgcgtagcgggtagaaatttcttatttatagatccatatggcaatgtttatccttgtctctatagattggataaaaaattgggaaacataaaagagaatccaaatttgttaaattacttagggaaattcaaaagggattgcaaatgttggagtgaatgccattacctaccggctaggaggagtagtacaaaggagctattatcatatatttggtttcgacttttttctaacaaaaaacatctctaagcattcatttagttggttattttgaaagtatttaaaagataagggaattggtatctctccatatcgtggcactatatttggattaaacctataaagtagctctcttagtttctccaattcaaaacttaaagtaaagggcaaatatgatccgtataatttaataatatagttagttcggtaaatttgaatatgtgttaaataatttattcctctttgcaaatttctccctttttgatagcaattagagttttaattccaactattgttaacaatattgtggccaaactttctattgctattgctaagtctataaacaaaggcatcttagttagatggtaatacaaaattgttgctatagttaaagcatctattggaaatatgtaagcccaccaggttagtttaaatcttattttaacgaatctatcaatcaaagttactagtaataataagaaagctaaagctgtaaaatataatatattggcgatactatctaaagagtgggttatttttatatagctaataaaccctacagatggaggagctagcaaaataaataatgaaggcaataacgcctctggcaatggttcatggaagaattttctataaaatagaatagttgttaaaattatccaaaatattattcctatagagaagaagaaccaattaaatattcctaaaatttggtttataggggttattggaaccaatatattaccaactattggtatataccatgttggtgttatagttgataaatgtagatcttttgtaatccaagttcttaggttaaaatatgtgaaaagcagatgtatcatagtgcctgcaattgctaagggtaaggcaaagttacattttaatattccaaaagatatagaatctattagtaaagctatagaaaataaaggcaacatcgataattttattggattatttatgtctttcaaaaactcttgtttgaaaaatacaatttttgccaaatataatatggctattactattaaagaaataaaggaaagccaagctaatcctaagcctatcgattttagatagggaaatagttctgccaatcttaaataagctattgataaacctccaatcccaacagggatagcaaaaaacccaggttggaaatatctaattctgcatgtcataaataaattgaatatatgattttaaatttatttttagaaaagcattatgcgtattaccgttatagattatttcaaagacatagaagatattattggtataaccgccaaatcaacccaaagtttgttccctccatcagaattagagatagatcaaaaagatatagacgatatgttaaaatatactgtagagcacaaactttcttcagtattagatttcccatactatattatagagatttatggagtttcaagaagctttacccatcaatgggttaggcatagattatcttctcacatgcaacaaagcttaaggtatgttaaaataattgatgagaaggttttagagttatatgaaagtgataaaagaatagaccttattacatatgtgccaaaatggtttgtaatccctccaagcattttaatttctgggaaagaagcgattataaaatatatagaagctatgattaatagttctaaagcttatttagaattactaaactacaaaattccagaaggaaatagctttaaccattggtttttaacaaaaaatagggagtatattccaaaagaagatgctaggtttgcattaccaataggtacaaaaacttttgtcactactgctgcagatgctgaagaatggttgcatattatgaaagttagatgttgtatggacgcccaatgggaaataagaattaccgcttggactataggatttttgttatatttattgcatccaaggattttctatagatttgggccatggtgtatacaagaaagatgcagaggtttctcaataaaaagggatccaacgtgtataaaaaacatatttaatttgaaggaaacattaaaagaaatatcaaacaaaattagggagcattttattaatagagaggatggagaaatagaaacacctttgggaagaattaagttttatatcgaaaacaaaaaatgggatttctttactatagatttaactgatatatttgggtatagaactagtgaagaaattaaaaaagaagttattgattattttgaatcacaaggaataaaattggataaaaatttgttagattttgaagttataggaaggataaggtatatctaattcttaaattctggggaaagagccctttaatttactattatagaataatgaaaaaatctgcaatgttttaatagcattccaaaatttctttggaaatccttttatatgtgaatgtagtaaaatatggctatagcattaaggttttctaatagtctgttaaaataaagaaaggtaaaatttatttaactttagacataggatttctaatggttggttacagaatctcctcattcgcatctgtataaacacgactccttattttaccttatatataggaattttctttctatatgcataaagaattaagaaaaatatggaccatattaaaactattaccaaaaacaatattccctgttcaaatatacttttgggttgcttttccaaaatggacaatattataattatcgtaacaaagatagaaactattaatcccattaataattgaaattttgtaacataaacttccatttgtttaatactattccaattctttaaatacatttgctatccctagtattagaaatgtgtaagcactaatgattgggagaaaatagtcgtagaaaacttcgacatttctaatattctagaaacgcaacaattttgactgaagaagaactaaagctattcgcctttcaatatttctaatatattagaaacgtgtccaatgaattagtgtctatattattattatagataactttcaatatttctaatatattagaaacttctttcgaatacgctccaaacaccgatttcaattcctctctttcaatatttctaatatattagaaacatcaaaatgagaacggaaaaataactgttaaattgaaagtctttcaatatttctaatatattagaaactagccagcagaatagaaactgcagtaaatgatgccttcctttcaatatttctaatatattagaaacagataaagttattgaaatagtagattataatagaagatgctttcaatatttctaatatattagaaaccttctaaaaaagtctatttttcattaactccgtccgcactctttcaatatttctaatatattagaaacactatcgtatacttgatcgaatgttgatttgaatgtttttctttcaatatttctaatatattagaaacctttccttctttcagtaaatttattacatcgtcctgtgtgctttcaatatttctaatatattagaaactattcgccctctatcgggtttgctttaataaactctttcgctactatgtcctcctctttagtataactttcaatatttctaatatattagaaactgttgtgtgttgttgcctatataatatatgatgttgtgctctttcaatatttctaatatattagaaacttctatatcatatttatatgcatatagtcccagtttgagactttcaatatttctaatatattagaaacggaacattttgttttccttgagcaaactaaatacatcgtcctttcaatatttctaatatattagaaacccacagggctattcgagccttttcccttatatttacaattacgaaccttattatttaaaaaccttctgcgaggttttatagtaaaaatatttaaaaacccctgcagaaagcaactttcactattccttttggtttcgaataagtatgtctcgatctagccttaaacatagaaaaataatactaaacaaaataaaagcaagtaaatcaaattatattagaataaaaccaaataattcctaaatattcaaatcgaagttattagaaatatcaattattaaacaaaaatctaatatatttgtaaatctttgtcttcgccaagaactattttatccataaggcaacttttatctcgcagaacatatattattaaggaatcagtttccccaatataggattgcaatatctttttcatataatataaagaagaagggcttatttccccttcaaacacagatctttgcacatggtataaatatttccttaaaaactctcttatttggttttgcctactaacatttacatcataaaccactatcgcatacatgtttattttatattgcattttctataaatgaaaactatatacatacttagtataggcaaactttataggggtaagaatggcctttactttattaacaaagacaaaaagaaaagtcccatacctttggaaagcataaaagagatatttatcctaaacaaagtttctgtaacctataatgctttaaaactattagcagatagaaatattccaatacatttcttttatgaaaatactaaaaaaggaatatcctattatttgggttctttcttaccgaggcaaaagacaaaatctggtttagttttagtaaaacaagttgaggcatataaagatatagaaaaaagaacagaaatagcattagagatagttgatgctattagatataattgtataaaggttttagaaaaataccacattgatgaagtaaaagagttaagaaaaatagatgtttggaaaatgtttgaagaaagtttaaatgactggaaagatgccataaatataataaggggtatagagagtaatatatggaatctattttaccaaggtttagataaaatattaaaactatataaattagagagaagaactaggaggcctcctaaaaatgaggctaatactattgtaagttttgcaaacactttattatatggagtaactttaacagaaatatacaaaacccatttggatccaactatatcttttttgcatgaattaagagatacaaggtattctttagctttagatttgtctgaaaatttcaaaccaataattacttttagaattttgatttggctagtaaaccaaggaattataaaggatacacattttgttaaaggtttaaatggagttttgttaaatgagcaaggcaaaaaattagtaatcaaagaatttaataaaagattggacgaaactattaaattgaaaagcgggttaaagagaagcatgagatggtatataaaagcacaagcctataatttagaaaggtttttgttagatggtagaaaattcaaagcttttaggttaatttattaaattttccttattactatacaaaagactattttgtttcggttttctttttgatgtggtttgtttgtaattccaaaaagcctaaaataactctttagtttctaataattttgtatatttagacaatgctttaagaccaacatattaagttgattatagccaaaccaagaatttaaaatataaaaacaaagataattaatgacaggaaaacctgacaattctttaacaatagatctatcaaaacttaacgatccttattacttcaatgttctcaaaagtcttttgggccatcttaaggatgctaggagtgcaaaagatatccaaaaactcatagaaatcctaaaaaacgaatctgaaaaatccatagaagaggatattagagcatctattttacccacatccgtttctaaaaaagaaggaagaaatttttacttaccaaaagaagggttgttagtagaggaagaagtaaacgaattaatagacgatttagcaggggtatatctatcttctggaggaaatatctacttattaaaaataaagaatagccaattgtttgaaaattatagtaataaaataaggggagaaggtattttggataatggaatagacaccaaacgcttattgggcgaagttgggcttccccgtggtgtaaagatttcaggagattttccaaatataaatttatttctaattttaaatgattttatattgtttatattaggttctgagaagttaaagaaaagtataaaccttaaagtagaagagctatctgatgacgttttgaaaaatttcttacttccttatttaaaagatatttcttttacttctggagtatatactgtactttctagacaaaagaaaaggaagtattacattacgaatcttaccgactttatactaaaattttacaaaaacgagatagagaatccatcaagctcgataatagggaagtttacattctctttttatataacagataaagatttcaaagataaagccctaggattactagacaaatttttgtattatcttattttcaaacattccattaattggaaaatcctttgtgatatgttaaatattttctatgactataactataagaaatatttaaaaaataacaagcaacctatacatatgagatccgcaaaggaattctttgcaatgatgaatttagagaaaatctatgattgggcttatgcgacaggaaaaacgattctagaagtggataaagaaaatggtaaggattatgttaacgagatcataaaggaaatcaagaaggaggagttaccagggaagtttaaagaagaactatccaaagttttacataaggtaagtgaaaaaataagaaaagacacaagaaatgatcaattcaatctacacatacatccagacatagctaaaaaagatttacaaggagacgagttttataaggtaaaggccgcagttctagctggtttaatgaactccctatgatgaagaccgttcaaatttctatattagctagagtatatggaaatgtaaatgcagacgaaacaataggaaacagagttacaataaagaaattctatagctctgaaggagaagttttaccattcgtttcagcaagggcaataaaatactctataagacaggcattaaaagaaagaggattcgagatagacccattcgtagctgaaaagaaggagatgagggattctggtaatccaataaagtatgtagataatgatttgttcggttttatggcaccctacaaaggaaaaaagaaaggagaagggggttctgtaaatagacaagcgccaattgctatatcatattttaaagctctaaaaaatactccaataaatgtagagtttggtgcgagatttccaagggaaaatactataaaaatagataaggaaaaaacagaagaatcgaatcaagaatcagatcaaaccttgaacccaataccttttgaagtagaagttgcagattttattggaagattaaatgtgttaatctatgagaatgttggtaagtttacagaagaagagctaactaatgtacaagataaaaatatattacaaaatatactacagaaggaaggcaaactttatgttttaccagaagaagaaaggaaaaaaaggctaaaagctttcttagaaatactattaataccaagttatgttttaccgaggagaaccaattcgctaaacattccagagtacaaagtcgctttaatagtattaaacaaggagggagttctacccatataccaatatctggattatgtaaaagagggagtggttaatttagagaaattgaaaagattaaaagaaatagttgaagaagcggggagcgaagcttatataattgactatgacggctgggttgaagaagagatattcccaaaaattactgttaagcaagctgtagaaaaaatattaaaccatctattatgaaagccttagcttttaggatttctttttttgaacacctcttcaaaaatcattatactaaagcgttcaagttatcttatccaaccttgttgcctacagaagctctaggattgataggcaacatctgcggttatgatagaaaaaatgtttataaagaactaaaagatctctattttggttccacttttttagatggatactatattgaagaaaatataacttttatccaattcaaaaaagagaccggtggtaaatacagatctggtatagttaaatcccaggtatatcacaattcggaacatttggtaataattgctggggatgagaaaaaactgaatgaaaaaatactgaacaagattaaaactctaaactctgatcctatagagaacaatttaggtaaatggttactagttaaaccaataagatatccttatggagggtggaatgatttttttgcaaaagatataaggattttggataaatttttagaagtagaggaaaaagagaatgttaggggatatgttcctttggattgggttaaaagcataaatgaaaactcagaaatagaaacaatgcccgtaaaatacaaaaacaagatggaatatttcgtttttataaaaagagggtatgcgttgttgaaggaaaaggtaaaaaccgtcttagatatacctatatactctttagaagacttcaattatttatgaagtgcaaatcacatcccaataaattattagaccaacacataaaagagattaaaaatatatttaataatttggttaatttctatgatattgaattaaacgaaacagagaagaagctgtttgattatttaatagagttacatgacatagggaagtgcagaaaagaattccaagaatatataaaaaaactggaaaaaggcgagaaaccaaaatctcccggtagccattctttatggtctttggaggaactggaaaggattttatctaaaatcgatttagataaggaatatttacccttattattttattttattgcgaaacatcactctaatttatctttaagtaatactgatgaaaaattaaaaaggcaaatagctaaacttattcttaaattaaataacttgctaaataaccagcccgaaatagatttattgctaaatcaaggattttttgaaatctattataagggtttacttaaaaagttcgaaaaagaagaattaataaaattggcggatctatttggagtattcaaaatttcagatatcttatcagctaaaaatattttagataaagttaatgaaatagtttataaagaggaaattacagaaagaaaagttgagcaattaatagggagaagtattgatgaagaaagatggggtttccaaaagtgtttgtcaaaatttgattatttgtccctaagagcgccaacaggatggggtaaaacaactactgctttattatttgccttaaataaagattataacaaaatatttattactcttccaacaataacagcaatagaagattttcgtcaaaaactaaaaaatgctggttttaaagcagaggaatatttctatttctacgatgctagagcaattttagacgaagaggatgagagattaaatagtttatattttgtccaaaatctctattctcctataaatattactacgatagatcaaatattgttatcatttctgcaagctggcaaatattttatgaaaaggttaaatctaagaaaatcgatattgattatagatgaaatccatctattaacaccacaaatgttgttcttgcttaaaaaactgctagaacatttggttccactctacaaaattaggttattattaatgtctgcaaccttaccaaaaggaattattgattacctatcagaaaacattaatatcaaatttgaattcgtagatatatacgaattggaaccaaaatatagaaatagggaaagagtggaaatagaattaataaaaaaggacatctcggaaaacatagagaggatagttgaagaaaataaaaagggaaagagcgttttagttatagcaaatactgtggaaaaagcagtatgtatttataaaagactaaaagaagagtacaatataaacaatatttctttattacatggaagatttatgtttaaacatagaaaagagagagaaagggaaataagggatttgttggaaaataaaggaattttggtttctacccaagttacagaagtttctttagatgtggattttgatgttttgtttacggaggctgcaccaatatcggcaatagttcaaaggttaggtagagttaatagatatggaaaaaaatcaaaatccaaagtgtatatctattatcctaaggagatagataaaattgaagaggacagaagaaaaaagtatccatacaatattgaagagataaagaaaagttggaaatttttagaagaactagataattttaaagaagggattttcataaaaaagattgatgaggtatttactaaagaattttatgaagggttaattaaaggggaagaaatcttttttaaatttagagaagtttttgaagatagaaaatcccaaaataatatacattggtttttgcaaagtacatctgaagaggtaggaaaaaaattattagactttagggataatgttaccacattaataattccctatggcgatttggttgaagccgagatttatgatgagataaccaaaattctagaggaatacaaaaaattgaaggaaaagccctactcatatgacgaatggaaaaagttttttgcgaaagccaaagcccatgcagtatcagtaccattatatctagttttagggttagatccagacaaagttggtttgcctgtaattaataaacttaaggaggattatgaatttaaatattttaaagaatgtgggtttgtgaatttgaaaaaactgaaagaaatggggtgtgaatttgatagtgattatacttatcaataaccttcccagcacaaagggtaataagcgcaagccttacaataatctttaaaaacttctctagggggcttatccatcgaaattattctttttatttcatttaaaatctcttttatttttctctcgtccttttcagttaattcaatgtattcctctttattatattcgggaataactagtttgcctttaacatttaatcctagtcttttcaaataccataaataatattttaactgccataaagctgcttctttaaacttgtcagatttttttatttcaaaaaccaaaacaaaatctttgtacctttttataacatcgggcgatatttcgtttattataacttttctctcatatttatgtttttctttataaaataactctatgtatttgcctatttgaaccaaatctgattcatgttccattgtaattttattagcataaaaccagagctttcttttgcatacaaaatagtaatatatataggcaccaccaattaaagccattattttataaagttcgatgaattaataatttatgcaaattctagacaatggtattccaatatattatttcccttcgaatgctgaaactattgccataggaattggcattaaaattggaagtatatacgaagagaaagataaaagaggtatatcacattttgttgagcatatgaccttcaaaagcaatactaaatataataaaaaccaaatattagatatacttaaaacttactctttttacaatggttataccagtctcgcccatactatttatgtgtttgatcactaatactaaatttgatgaaaaagaattcgaaatagaacgcgaaatagtattaaacgagataaagagatatgattctaggcctgcaggaattttatgtaggaacatccctaaatctttgtttggggaatctgactatggagaccccatcgggggatacgaagaaactataaaaaatatagaaaaaagtgacttagaagaattcaaacaaaaatactatgtttcaaataatatgtttgttgtagttaatgggaatataaaagagaagcataaacaaataatagaaaaatatttttctaaaatagaagaaggaaacccaaaaaagaaaaaacctactatagggaagggcaaagatatagaaataaaatttccaactaagctagttcattgttctttaaatttcgaagcgcctttggatttaagatataaattattaacttctatagttggctatagaggattgatgaacgccatttttagagagaaatacggaatatgctatagttgcagtttctacatttataacacttatccggatagactcgctattagtttagaattaccaggaatagaaaagcaaaagcttgatttggtagaaatagctaaagaggaattctttgaaaagctaaaacaactagatgaacaagaatataaaaaagcaatggaaaagttcaaattggactttatgacaagtaaatacaacctatatttaaaaacaaaaaaagatctaatatatattaactattttggaaaaccttgggaatccatatacaaagagttgcttaatataaactatgaagagttaaaagagctaactttcaaaaatggcaaaaaagttattgtaagcgattaaatataacattattataacattatgcccagggccataattttaggaggaggtgtagcaggtttgcaagcagcccatttattaaaagataaagcagaggtatatgtaataacagagaatgactattacattagcgggccttcgagaccattaattttaagcaacgaacaacaattagatagaatagttagaggttacaaccatttacctaaagaaataaaagttttgtttggcaaagctaaaatagatttagaaaacaacaaagttttagtgaataataaagaattagaatatgattatctaatcattgctaccggtataaaatatgattataatgcaatagatattaaggataaaatctataatgtatacgacataggaaaacttttcgatttaaaacatttgatttggactataaacaaagggtctatattggtttatgcgccaaaacaaccttatagatgtgcccctgcccccggggaaacaattatgactatagacatggtattaaggcatagaaaagttagagataatataaaattaatatttgtcgatgctaacgaaaaggtacaacctccagtaatacacgatgtatggataaaaagatttgaagaagcagggatagaatattatttaggcaaagaaattgtagaagtaaacgaaaagggcgtaaaactaaatgatggcacatttatagaagcagattacaaagttattttgcccccaaacaaagctaacaaccctataggagaaggctttatagaagtaagaagtccaaaagatttaaggttaaaagattacgataatgtttatgctgtaggagatgttgctaaattgcccttccctaagaatgcagaaatagctttgcaaagcgcaataaatgcagcaaaccaaataattgcagaaatagaaggaacagaatataaaccacaagactatagatttggaggatgggcttacatgggtaatttaaaagaactaaaaactgaaagtacattctttagcttagattttagcgaaggtaaacccaaaggaaacaaagacccagagccaaaagtagaatatacaaaaattaaagaccaatgggagcaaagcttattgaaaaagctattcggttactaattttttaattgtttttaattttagttttgtgaaagatctaagtgttattattttatcgggaggctttgcaacaaggttaaaacccctatcagaatacataccaaagcccttattgcctatcggcggtgtaccaataataaattatattttacaaagggttatagaactaaacccagaacgaataataatatctgtaaacaaaaaattcgaaaaccattttagatattggttgaaaactttagaaaacgataaaatcgagctaatcgtaactcctataaaagatgttaaagagcttaaaggagcaatatgggatttaaattactctattaaagaggcttggattaacgaaaacttattagttgttgctggagacaatttgtttgattttaatttaagaaaattaattagaataatgagagaaaacaaatcatttgctttggctttgtatgatgttaaaaatttagaactagctaaaagatatggagttgtaaagctaaaaagcaataaaattatcgattttaaagaaaaacctgaaaaacccgaaagcactctagtttcaacagcaatttatgctatccctaaagaaaaactaagtctaatagatgaatatatagaaaacccaaataatgaaaaagacaaactaggaaaactaatagaatggctactttacacaaaaaatgaaccggtctatggtattatttatgaaggaaactggtttgacatcggtagtttagacgaatacattagagctaataaatttgttgaaaaaacaggttggaataacagatttctgtggccttagaaataaaatatggctgtaaaagatattgtctaacttttagtagtaatacagagctttattagatcgttactattaatattatgaagacgatagaaatagaaatcgttagacctgtaaacccagtgggtattagctttgtaagatatctatggggagctatggcagctagagacagagaagtattagagaggcatagaaaagaattctctaaactagtacaaaggctaggctatacaatagaagaaaaaattggtactggcaaactaataacaggcaaagtagtaatagaattggatgaagatgacaaaccattaaaagctagagtagaagagctaaaaatttgggagccagtaaaagaaataaatgaaaaaatcgaagttgaattatagcgagttaaattctatctataaagatttagtattttttgattctaattatattcgtaaaaccctacatagagctgattatatcgaacaatttttagataaatacaaaatagattatcatatttacgaacattttgttttagttccagattgggtaaaatactatttatacatcgatggacaaaaaatagatgtattgcccaccggtttaaaatctggtaaaatagagaaaaacataaaggattcgtctgatttggagaataactataattatcctaacataaattttaactcttacttagaatctaaaacagatatttcaactccaatattttataatgttccttctttagcagtatcgaaaaatagtataaatcttttattaaactctaatgacgttgatggctatctaaaagtaaaaataagagatataaaaaacaaaaactttgttattggtaatgttgataaagccgaacaagcaatagttgtgcattatgacgctttgtggtatggggcaatagataatacctcttcgcttggattaatattatatatgctaaaaaacaaagaaattaatttgaataagaatgcaatatttttgataggttttacagaaatagcatattattggcccgaatactgggactattcctttattagagttatagaaaaatacgaggatgtttttaagaaagtaaaaagaaaactcataatagattgtattggatataaggatacacaatttttaacggacaaagaatatatcgaagcttatggtgtgtttggtgataatatattaatttatggtactcccttagagggtttaatagcaatataccatgctacaaatgatacaatagacaaaataaattttgaccaattgaaaaaagatagagactcactcaaaacctttctttcttagatattctatcaatttatttctatctagtactgttataactattgagtaagtgtcatctccttctattctaacgaagtctaatccttcatattcttgtttttgtttactaatttctctttctaacctattaaaatccattatcttatatatagaaaccaaccgtcttaaagttcttgcagagagataattttgatcttttctatgggccaaatagtatagaaatatatcgagaatattcctatgtctatatttgttccatatttcgtaaaatgtttggaattttaacaaatcataagctatggattttgcctttctgtcaccaaaagcgattactgaggctttagcatagtgaggtaagaaggtttccttgtctatagtatcgaaaggtactcttttgactttttctaatgtatccataatttctttttccttggatttaaatttattaattattttttcgggatcgtagggttcgtgctttttacgaggaaagggcgttacacttttaccgagttcactacacaactgtgggttatataaacaggccaataatgcatacatatcctccagtttggtaagctttatagagaaaaacactgtgccagcgatatacaacctatttaactctggtttttcgtatatatcaaaacctacaattccatccaattcttttcgattcttttcttcatataacaactcgactggatctttgttatttctgtacttaggggagacagaaattttttcatagtattccctaagatcccatggtaagtgttgccatatataataaaataccaaccttctagaaatagccaacggatcatagggatccaaaacacctttatcaaggttgtataccgagaagtatataaacgagggtaaatcatctatccctgctttttttagctcttctctattttctttatagaaattgaagaatttttctattcttgattctagtggttggggtaatgtgtaaggcaatctccccctatgagggaataaagatcttaaacttcgctttccaagaatgttttttaataatttagctattgcgctattttccatggcgcagtaatatgtaacaatttaaaagtagaaataaaataaaaaactattttatgatagttagattttcgcatccttggcttttacatatatttattagccattcaatagcttttctgtttcccaatattgtgttatttatttcacagaaataataactattattaatatatacgggtttgcctcccaattttttgcataattcaatttcatattcttttccataatagtaaccattattatcttgtatttccgatggatacccgcttattataattagctggtttttggttttagcaaaaaccaagggaacaccattaaaatatttggcaacaaatttgtaataaggagttttcggaaattccctataatcaattgttatagctttaattcctaattcatctaaagttttaagcaaattatggcaatgtggacaataaggagagtaaaccacatatatattataatgcttataatgcttaggttcggttttgtgcattaataaagttaataaaggcagtaacaacaatggcacgaatattaataacttcttcgccttcatatcaagtatagaagaactaacaacaatagtatacctgctactaaatgcaattccctaatatgtttatctctccattcttttattttttctggagaaaatccataatacactaacaaagttattagaatcattggtgaaacgaatattgttagataatataacaataacacccaatcaattgttttttgcaatcctaaaaagctaacatatggaccggaagagcatggtaatagaaataaactcaacaatatcgctaatgggatcgctattaagggatttttggtattttctattaattggttagccaatggtcttaattttatgggcatctctatcgatattaaacctggtttgtaattaaagtatgctgctatttctaatatggccaaaaccaatagcaaaactaacaaaaatattcttacataatcatagaacattgataatatagaatgtaatatcaaaccatacaatagatacattatgaatattgtaatggtaaacaaaatcccaccaattaaagcatctcttctacttttagttaataacaccgctaataaagatgcttgtatcgctaatacacaagggttaatcgcatcaaccaatgctaatttcgttgttataacaagatccatagaatgttataaaacgttatataaaaatttttagagagaatctcttaaatctctgagctttttaagccttctattcgattctaaaaaggaataaaccttcccatggggctggccctctattattctatttatggactctctcgctataattaaatcctctatctttcctagcaaataggcttcttttttcttatcatctattataacagaaacccctgttagattggatatattctttttagctttcccctttgttccaattagtctagcaagaatcctttttctctctttatcattttttgttgccctttttatggggattaccataaaatcatagttatcatctaacaatttgtaagcttcttccccgaaaccagcatttaaagcgtcaataatctttattgccttgtttaaggttaatccatcatttgctttaactatataactgttctctttttcttccaattctatgtttagtctttcttccaatttctttttattccttattatatttggttttttctcaatttcgaaactaaacattttggattactattataatgcgatttataaatctatggggcgggggggatttgaacccccgacctcccggtcttcagccgggcgctctcccgctgagctaccgccccgagattggtatattatatagtttaaaggctttatccatttaccaccataaaataagtattcctttttgttagatggttaaacatttttaaatgatgaatgtaatagaccgtatgagaaaaattcccttgcctaagaagtttgtctataaaattgaagaaaaagcaaaaaactatataattaaagaaggtcccaaacttgctccaaaattggcatcggtattgacaattttagccggagcaggtttggcaatggccaaagaatatgaaattgaccttagctctgtaaaagagggcaatatccaatacaaaaatataaaagtaaaacttaatgatacagatatttcattaaatgggaatgatatggttgactatgtttatgagaaagatggtttcaaatatattgattatttaaataaagtagtaagtgacacttcgggcgactggtatgtaaataacgctttctttacttcaagtgtcaataacccattaagatacagcgatttaatcgaaaacgaccaaataaaattgtctatccctactaaagaaaaagaaatcaataaattattagatgaaaccgatacattaaataatttgggaggggcttaccaaataaccgatggtactttagttataccaaaatttgaatataatggcaaaactcataaggtggaaatccagttagatggtgtaaataatgcgaaattaaatataaaattcaaagtattacccatagtaatagatgaaaagggtcttaaattcaatgatagtgagtccttatctaattactattttgacaaaaataaacttatagattacttaaccaacatagcaagcaagatgaaggatacaaatggccatctaatagtaaaagatggggctgtatttgtagattacgataaagacaatatctgggatgctggaatagaacctggcacatatattgatgataccgatttgggaaaaattctaacaggtagagcaatatatgctattggtaacatttctatggacagtttaccacaatatataaaggtagatgggaggaatgtggattcgtcgaatcccatctatacaaatataagtagggcattacagaatggcatatcattcgaaaaactgctgtatcttgtagatgttagcgaagtggatgctgattactctaaaaaattcgctattcctgcaccagtgcttggagtaatgggattggtaccattatttaaaagaaaaaggaaaaatgcttagacttataatattatttttaactattattggagcattagctatcaatgtaaatgtatatagtggcactttagtaaagagtgaggataattatttaattctattaaaaataggagaaggttcttttgatgcaaataaagtgacaattacttcgttaaatagcacattttatttagattattttaacaatataaattcgtctattgataattatgtatactttgactgccccagtggtataaaacatacaattacctttcatgatgtaataaatgttgggacggatagaggaagaataccacaacctacaataattcttgatatacctaacgaaacagggtgtaaactaataatgaaagattataataatgctttggaaagatctgaatttaatgtttctgtttgtaaggacttaacttgtaacaaaaaccatgtacaaaaagtcctatctgtacaacctaccgcaacactaagcgtttctcccagtactattaatgttggagaaagcgtaacaattactctaaccgccaataattgttacaaagatcctgttaatttaggaggaagctacgaaattaccgatgataaaagtgaaatatcttacagtggtacatttaatgggaatttaagtattagcaaatcgtttacactcacacaaacaggtacacacactataacagcgaagctctattgttataatggaattataacaaaaactgctactgttagagtaaataaaccatctcctactccatctccatccccgaaaccatccccatctgtttctttgagcgttacacctactagcataaaccagtatgaaagtatagagataacagcaacaataaataattgtaatgggggaacattccatatatgggatagccaaggtgaatatgacaaaaccggtaatgtaacaggtaatacatatacttttactgatactatacaactaactataccgggtactcatactatatctcttagtgcaacatgtaatagcaataattacacagatagcaaaacagtaattgttaacgaagtaccattacaaattaattccgtaacaccaataaactttacagctattaaaattgtaacgaacaaatatgttaatactataaatgctactttaaatgaaaaatatttgcattggacgccttctcaaagaaaaatcgagaattataacgagaaagttgattgttcacaacaaggcataaaatatgaatatatatgtgtatttaacaattttatagccaatggatcaaaaataacaatagaagcggatagtaaacaatttaactttgctatgaataatgaaacattgccagacattttatattatatagagcccaacaaacccattttcatagcttttgaaggatatgttgatattagttataaaccatttaatgatgctatctccaatttaacaggaactttcatggcttatgttaatgaaacccccatattgtatagcgatttcagtgattatttacccccatacctagcatatttcttaaatatatcaaatgcggtatacttacctataaaatataaaaatgtaacaaatcccaagaaatataatctcgaaaagggcaaatattcattattagcacttgctggtaatatagatggaatggcaaacaaagtttctatagatttatccaattttgaagtgttcgatttagtgtgggatttcagagagggaaaacaaaccaaagtatttgatttaactccatattgggcaaagcctttaacaaatataacatggcctaactaatgcctgcaataccaaattgttattatggcaatataactaacctatgtggaatagatataaataattctttgctaattgcagagccatcaaatagctctatagaagttgtttgtgatccaaactgccattatggagggccaaaagttaaggacaaaaagctatgcctaaattccggtaattatagtttgtatattttgaaaaatgataaaaaatggtttgttgaaacattagaagtaaatgcgaatggctctgtagtaaaaaaagatttaacatttagatgtaacaaaacaaccaataataccaataatacgaatagtacagaaaatagagaagttagtactgacaataaaaatagaagcattaataataaaaagttaagcacatacaataaaattagtaatattgtagttccagtaacaaacaataaccaaaaccaatattatatcccagcattgtattctatacaagctaatccaaccaattctatgtcttttagcgaaacatatgagagtaaacaagaaatgcaaaaacaaagcacacaaaatatagtaacaatagaggaaaacaacaattggatatggatactgcccattataatatttttggttagctttattcttgctaaaaacctttaaatgataaattatattttttgaatgaaacgttttctcccagcagtagtagttttgggtttagccctagcagcaccaacagcgcaattggaagtaatagattaccctaatacagtatatactaaaggagtaatggcgaagagcacaattccaattactataaaatataatactactgatgcaacaaactccaagcttatagtatatttgataaaccaaaatgagaaaaacttagcattgatggaagaatacaaaatcgatgcgggaaaaactaaaatagaaactatcgaaattccattatataatttgcctgattacccaaatgttgatgatggtatatacacaataaagtttaggttaatctcttttgataacaatggaaatactgcggctgatgaaaaagagataaacgtttctattaatgaaccatttgatgtcgcacaatatgatttagatgttctagatttacctttaccagaagacaaaatagtatttaccaacacaaaaacgaaattccaaatccctataatttatgatgggatagcaaatagcgattatgttactgtaacattatgcgctatagctaatggaataaaattggcttgcaacgataccagcaaaacattaacaacaagggaaaacttagtagaattagtaatgaatattccatcctttacaggggatggcaaattaatattatcggtaaaagacaacaatgggcaaaacatagtaaaagaatatgctgttaaatttgttgatggcacattagatgtaaatgtaatgcctgtaagcgaaaaggtaatgcaaggcgaatccacatctattatagttagagtaaacaacccaatagaaaaaagcagaactgtatacttaacaataaaaaccccaacagatacaataaccaaaactatttatttagaaggctatagtagtgcccaattagttattcctataaaggttaaaaccaattcaaacaaatttaatgtatatgtatacgcaagcgatggagtatatacatacagcaaacaattaacattagatgttgtctctaaacaagatataataaacaacatcgatgttagttatgaaaaagacaaaatagagctaatattatatccaaagcaaccaggggttgtgacaataaaagtgttggccgatggcgctatagtagatccttccataaaaaccatatctttagactacaaagctaaaaccgttagttttaattacaaaccattaaaagacacagcaacaataaaatttgaagtatatgatctaaacaataataagatagctgaaaagcaaataaaaatagtgcaaaagaaagcccaacaattcaattggttattacccatagcaataataatagccctaggattgggcctatatttaggtagaaaaaagaaagaagaaattgttgaatagactttaaattatttcattttctctataagtgaaacttaataagatagtagctttgttagatataattggtgatttattactatgtaagatgcgcgacaactattatatcgatatctattctgatgaaaattctattgttgtagaaagtgaggacttagttgtaacattgaaaaaatccaaaaatgataaggttttcataaaaatagaacaccctttgggggaatggcgcttttatgctaacaaaaaagagctagaagaaaatttaaaaaatacaaaattcgccaaattgtttgtcaaactaataaacctttaaactattatatagatattgctaatggcctttagccatactaaaaaggtaggtcctactggtaggtttggtcctaggtatggtttaggtataagaaaaagagtactaactgttgaaataaaacaaaggaaaaaacatgtttgtcccttctgtaggtctaaagcagtaattagagaggcatatggaatttacagatgtaaaaaatgcggaaaacaatttacaggtttagcctattacccatacgagcatttgcacgaatattacaaaattagaggggggcaataaataaaaccatatctcccctaacaaatagttctttcaaattctcttcatcaatttttacctctttcatatataaattaacatgtatatccgagctttccaataaaccttcaatggttttgccattttttaaataaacctttactcttttgcctttcaaagaagctaaaaactccaatggtctcatcgttaattcttacagtaacatttataaatggttttgttataacttactacgcggggtggggcagcctggagtgcccggggggctcatatccccctggccgcctttttttcatatttaatggacccgccgggattcgaacccggggcctccgccttgcgagggcggcgtcctaccgctggactacgggcccggtttcgattttagatacaaaataaatacattttttgtaacttaaaagtagtaatagctatatttaaagatgagctttaaagcgagggatggataggaaaattattgaagaaaaagcaaaaattgttgatgaaattccaaaagtaataaagggcaaagactatcaattaaagctaacaaatatggtattccatgttaggttaacttcctcaaaaccattagatttaagtaaagttgcagaggaaatggttaatgccatatatgaaaaagaccgattccctggggttaggctaaaactaaatgtgccagacgaaaatggggggatgcacacaatttctattctattatttagaaaaggcccaataatcgtttctggtgtgactaaaaaagagcatttgatagctgcaatagaatacgcttgtgacataataagaaaatatggcggagaatgtatagaagaaccagaaataaaattagaaaacatggtatggacaggctatctagattatgaagtaaacctagctttgttagcagaaaaagacccagatgctgagtataaccccgaacaattcccaggtttaacgtataggctaggcacagacaaaaaaggtagactacatttattcaaaaacggtaaaattgtagttccaggaaccagaagtgtggaagaaaccaaaaaaatcgttgaagaggtaatagaaagaattaaaaaatatggagtagcgaataagaaaagtgcatgaactagtttttgctttgatttctattttatttttatcattaattgcttttaaattttcttatttagagcaaaatgcttatactacgggttgtaaaatagaggatttgttaacaaaaaaccccttttcaggaattgttaagtctattcactatcaaattgaagaaacaaaagctaatttagattttttaaattggattattgggattaaaaaccctttgtctagtattagctatagaataacagttggtggttgccatatcttgtatagagaagtatcaatgaacgagttttacaaaatttataaagcctttctagagtacaaagggactggcgtatatttttatggtaaagtaattggcaattataaatttcctatagagattccaatttatatagctgaaataaaagatttgggcgacaaatataatatcactataacaaggaaaaatgttaatagcgattatctcaataataaaaatgttagcttagtttcgagcgacaaaatgttagacatattaataatgggatacgaagagaacaaaattcccttatatgctttagaattaaaaatagccgcaaaaattggagcgtgggctggggaaaaagttttagtggtatatgaagaaaataacccccattagtataggcaataaaatattatcataaggggttaacgcttcagctattgggaacaaaaatcctataggcattttagttactaaaaatccaataatagaacctatgtaaccatataatagaacaaaacaaatgtttttgcttaaactagctaaaccatcaacccatgcttggtaaaccattaatttgggttctataaaataatatattatactgcctaaaactaaagtaaatgcaccaattccttttccgtctctatcgtaataatccaaaaacctttttactattgggttattcctatgcttgtatagtattagccctataatcaataaagcaaacaaaacatacaaagctatagaattaaaaacatcgaacataaaagctatcgccatagcgctcgctatatggaaaatctttctattgccttcttttcccttactctccaaaaagctaacaaaccaataaattattggtataaataagaaagacaaaattatttgttctattgtatgccttccaagtataactcttaataaacctactaacaatggaaatactactagttttacatctttgtaaaacattaaaagaacagaagcgattaatgtgtgcccactagggaaagcatatgggtctatatgggataccctataaacatggaacatcattttagcagtaattgttatcgctattgtacctaacaataaattaaaataatggaaaaatttttctgaatcccaatgtctataaatatcgtataaaactagcaataagggtatatagcttataaaagagatcatctgtagcgctctcttaacaatttaataaaatatttttcattaacaggctctccaaaggatttttctaacaaaacttttggttcatacatagagccgtatttatgaattttttctcttaagtattctctaatcgtagcaaagtttttgttttctatatgtgtttctaagtctgggaaattgtattttatttgtgctgcaattagattacctaaagtatatgttgggaaataccctattgctcctaaagaccaatgtatgtcttgcaaagccccttcactatcgtttttaggttttattcccaaatattgttccattttttcattccatatttcaggaatatccctaacatcgattttgccttctattaaatcacgctctatttcgtaccttaatattatatgaaaattataagttacatcatcagactcaactcttattgggataggccttactattgtgaaatacttaaatagatcttcgctatcagcatctatttttagtatattctttactaaaggctctaagaattgggtaaactcttttgttttagcaacaactatttcccaaaacctagattgtgattcatgtattcctagggatacacccccttgcaatggggttttccatagcttttcatctatttgtctttcatacaaagcatggccaaactcatgtattaccgctaaaagagaccttctgaaatcttttttatgataccaagtggtaattcttatatcatataggcctaattctatagtaaaaggatgtgcgctaacatctaatctcatatggttaaaatcaaaaccaatcatagacaatactgttttattcaataattccattctttctctattatatggttcattttccaaccaatgatagtcatgccaaatctcttttattctttcgtattcttttttcaaatccctctttaatctattaaataagggatctatgtctttaactgtatagccctcttcgtatctatctaacaaagcatcgtatggtgaatatttatagcccaaatattcagcaaactttcttttaaattcgactattttttctaaatatggagcaaatctgttaaaatcagattttttctttgcatcttcccatacccttacagcttctactataagcttattgtattcttctaactcttttttaggaatttttgtataatagtatatacttctttttaacactcttgctattcctttttcaaaatcgttctctgctttttcttctaattgttcaacccatttaataaattctttgtctgtcattaaatcttgtatcattgattctattttcgatgttataaatcctctctcctttgtttcgcccttaggcatataagtttcagaatcccattccaatacagcattggctttcgctagtacccatattttttcataatggtctaaaatcttttttaccaaatccatatataatatggaaagttataatttattaaaataccagtttgtataatttgttcacattgacctctttcctatggtcttttatacctctatgccttgcacagcttggacatacatatatttttcttttttggctaaatactgcaataacttcattttctgaaagctctccagcaacgtttggttttgtgtatattacataagctttctcttttggcaatatccttccacaatagtagcatcttactgttttggtagaccttactctctcgaacagtaccactcggtttagttagagtatcctttataaattatatttgcatcttatatctgcctctcctttctatgtcttctacccttttcaaaacttcatcatttttataatattgggcaaattcttcccatctatcttttagcaattttcttaattcatacaaatctacagctttgtcttctactctattagaaataaaggacagaccaaaatctattatatatagtttatctcccaatataaagttttttggatgcaaatcgccatgtataatattattttcatgcaaagtattaataattaaggccataggttttagataatggacaaaattgctcacatttaagggttggccttcaatatattgcatagcaattataaatttgttttcatccataagatagggctctggagtattagttattttgtaagctttttgcaatattttgtattctcttcttagtctaaactttctaagagaaatatctattttttcatgtctatattttttaggaggcctatattttattatgtaaggttttttgcctattcctaaagaatcgttatagtctaaatatattattccttcacttccccgagctatttccataggattgtccttcgtatacaaataaatatttatcgcatctcccatagactttaaattttattattaaagctttgtccataaaagtggcaataaagtttctaactattaaatcataaataaggctttctttttttgataaccctttagggattataccagtaggataaatagcgggatgggcatcctctatattaccattgttcggctttaggatgggttttttaagcaaataacttatgtaataactataaccccacaattttagtttttctagtatatatctatagtctaagctctctggcaatatatttgaactagtcctaggatagcttatatagccatttgtatatagtttttgcaatattaacaaagtatccttgggcgatattttatagaatttgtatgcatcctgttgtatagcgcttaaattgtatggatgtggaggaggcaaataaactttttcctcttttactcttactatttttaattctttgcatttggctatctctttggccctttctaaatttttaagcttctctatatagtaaaatttgtagtttttgtgtataaatactactctataatactcttctggtatgaaattagatatctctttttctctctcatatactaatcttaaagttggcccctgcacacggccaatgcttaaggttacatctttaacataatgccttaaagcataagttaatgctctagacaaattaatcccataaagccaatctattatatgtctagtctctcctgctattgctaagtttttgtctatagattctcttagattaaaaaatgcttccctaagatcttttggagttaatgcagagaaaaccattcttttcgcattggttttgtttagagcaaacctcaatatattataaccaattagctctccttccaaatcatagtctgttgcaactattacttctttttcgtttttatattttgaaaatgctttagcaaattttgttttacctttttctacattccaaaaataatcaaatactggataacctctttggtttgtatctaaattatatatatggcctgctgcaggtataacaataacgggtttgctatctattttaaaataatattgggggggattttttgatattagcttataatttgtagtaagggaaaaagttattctttttgctaccgagggtttttccgctataataatcatctataccttgagagtgtatgattaatatacttttaccattataaacagcgctcccactaaaccttttttcatcggcaattctagataatgtatacaagttcctataaaaaggaatattaagcttttcctccacatcttccatagtaagtttctttatttttccgttttttctgtacaattctattaattcgctctcaataattgttactttgttaatatttttcatagagtttaataggtttactaacaacattagggttggaatatctatttttttcgtaaatgctaactctatgtggtattccatagcaatatttattatctatcatttaataatttttcacttatataaggtattttattattacaacataaagccttgtatgatgctacttgttggtttaggtggtttaggctctttgctagcatactatttaagagttctgtataaaaaatggtttgttgttttggacaaagatattgttgatgagagcaatataaaataccaccccttttataataaaaaagatttgggcgagtacaaagctaaaatagtgggtaatagattgggtttgccttacataatatctgacataaaagatatagatctttctccttacaaaattgtaatagaagctttagataattggagggatagaaaatatttaataaaaaagtctaaagagttaggttttattctaatacatactgcggttagcgaagacaagggagaattggccataattaaagaaagccacgattattttctaaaattcgaaggagaagggcatgccagaaattatatgcctttaatattttctcctattgcggcatggtttatcgataattattaccaatattttgacaaatttgtaatttttaaggattgggaaataactatattaaatgcgaagcgtgtccctaactttaaacacaatagtaatgatagctttggcgattagcgttttttccatattatttattgttctatccaaaacacagaaatcaacaaactatattttgggttctcaaaaaattgttgtaacagatgtagctaaattagaggaaacccgtaatatatgtaaatctttatgcgaaagggcgaaactattagattttcttagctccacatattgcaataagaaattcgaattaaaaataattgaaaataacgaaactgttaataaattgttctattgctggcaacccccaataaatgtgaaatgtgaattctccaaaagcattcctggagaaggaatctatttttattatgaaagcgataaatgcgaatacttctttataagcgataccgaattaaataggctaaaaagccaatatttatataaaatgaaagagctaacagtcaatgatttgtataatgataataactacgaaaacaaaataactatcgataagcccttaccaactctaaaaataaaggaattggatgattacaattttaatatagaatgccagttaatttctgaattcgacaacaaaaatattgatagtcaaactaaatatgtgttattctcggcaaaactaaaaattaatggcaattacaatgggaatgacataaacatagaaggctattacccaataacatggaaggttttgcctaataatccaaacataaaacaatatattatagattatttttccaatttttgctctttgttgatacaatatataaaatatgaataatttttaaccgatggatagagaaaaagcattacaaatagtggaaaaatttaaaaaagaattaccagttgtaggcgcagctataatacctaataatttaccaactttcgagagatatattaaatctctagtagaagagggttatttattagaaaaattcgttgacgaagcgaagagtaagccccatttaattatattaataaaagattttgagaaaccaaatgaaataaaaaagaaaactgctgaagtattatacgaagtagccaaagagaggcccccattttgggttttgcctttgttagttaaagaaaatttctttaatttattgtctagaacaggtttcctagaaataatgccttacatagatgttttgttcgatgaaatatatttgcaagcagcaaaatttggggggctatatttatatgcattagccagaaggttaggcgatggattagttgcatttgttttagccggctccgcagcgagaggagaatacaaagagaatagcgatatagactttttcgtaatatatgatgatactataatacataaaccagtaaggcatgaattattgttgttggtagaaccttttaggattaccgcaggaatagaaagacgtgttaatatacaggtttattctttgtcttctttttgggatagccttagacaaacgaacccagtaataataacattcttaagagacggggttccattgtatgataggagagaattcactatatggaaaaccttattaaaagaaggccacatagtaccaacaaaagaagctgcagaacaacaattagtattagctaaagccaaattagaggagatgaaaaagaaaatggttgattttgttattgaagatagtttttgggcatcaattgctgcagcacaatcattattattagcaataggtgttataaccgttactccaaaagaaaccataggagagttaagaaaactgggttataatgaattagcagacataatagaacaaatctataatagaaggaaagagatagagcatagcgatcaagaggttaaaattgatggcaaagaaatagaagaaaaatatttgttagccaaaaaagttgtcgaaaatgcagaaaaggaaatgcccaaactagagattgttggtatgaaaagagaagtagaagcattaaaaacagaaatagaagctttgttaatagaaatagaaaaaacagttccaaaattattcaatgaattgattgagaagggccatataagtaaggaacaattagaattattgaaaaagccattacccaacagtttatccgaattggaaaaaataaagaattctctatgggatttgtatagaaagttaagcgttattagggaaattagggatactcaatatttgttccatggcatattagttagatataaggggaaagagtatattttgctaaaagcggacaaatattatttgtatgactctaacgaagataaagtctatgttgtaactgacgaaggcctaaaagaagggaacagagacgaattagatgaaaaactagaagaaataactgaagagagagtgcctatcccaatagaggatctaataaaaataaaacaaatacttggagatgtagagatattaattagtaccccatattagcttcgtaatagctggcaaattttgatagcaattctctattgtcctttatataatcgtaaagcctgttcctaaagcattgcaaccataaatatatcatagcgctgtccttatggggatataaatttattaaaactatctcgtctgctttatcttttagataatctacacttttctctaaatagtcataattggcgggaatattaactaacaaataaacccttaattttaagttatgctttttagccctattaacgaattcttcaaaatcttttaacctaaatggtttatttagtttttttagcaattcatcatctgccgcctctaggcctatagctaaatatgtagtaatgttatattgcttcgatagattttctaactcttttgctttctcctcacttagaaattggggtaaagtttctaaaaccaattcttttatatttctctcgcttgcaaatttgtataaccatttaatatactcaaatggtatttggttttcatccaacacactaccagaaacataaattttcaatctttttatgccatcttttacatgtttttctgtaaattcctttagctcttcaaaagtttttttagggtattccttttttccccacccacaaaatatgcatttgccccaggcacatttgccagattttataattaatgtttgctccattagaaagcttcaattactattttatttatgcctttgctttttaataggttagcaatttctattacgaattgtctcgacccacatatataataggttgcatcattatatattaggcgatctatgtaatcttgtacatgcccatggtattcggattgttctttagataatataggaatatatattataggcaattgttcaaacaaatctctaaaaactaacaaatgcttatacctttcttggtgtacaacaataacttttttattttgtttcaccgcttcaatagttaatggccttattggggctatacctgtgccagcccctataaaaataactctatccgtatctgccctatctaaagtgaaatgtcccatggggttacctatttctattgttgaacctaatggtatttcagctaaataattggacatcaaaccattgggtactcttttaatgtaaaacaataggttttcttcttctgggtgggaagcgaaagaataaaaccttcttaccttgttattgtttattgtactttcaatatatgtaaattgccccggtttgtaattataatctttgggcctttctacccatagcaaataatggtctttatctataaattccctttttaatattttaaccttcatattgcgaaatatgaataaaatttaataatgatgatggaccaaattacagaataatgaagacgaccacgggcactgagttttaaatattttatcatttacatcccatggatgaaaaagagaaatacaaactaaaatccctcttaagacaattaaaaagcatagaagggcggggtacagaattggtttccctatatataccatctaactatcctataggaaaaatattagaccaattgaattacgaatacgctactgctgcaaacataaaagatgatactactagaaaaaatgtacaagcagcattagctaaaataataaactatttgaaagattttaagaaaatccctgaaaatgggttagtaatttttgctggcaacatagcagggaggggcgaccaagatgttagactatgggctattgtacctccagaaaaaagtaacctaaaactatatagatgtgattctaaattttatgtagagccattagaagaaatgttagaagagaaaaaactatatgggatagtaactatagataaaggagaagcagcaataggtttaattaaagggcgaaaacttatagttttagacgaattcgaaagctgggttccaaggaaacaccataaaggagggcaatccgcccgaaggtttgaaaggctaatagaccaagccacacaggaatggttgcaatatgttgcggaaaaagcgagacaatatttcgataaatacaaagacaaaatacaaggtattattattggaggatctggtttcgctaaacacgattttatcgaatatttgccttattattataaagacaaaataattgctattgtagataccggttatagcgatgcctatgggttaagagaagctttatatagagcagaagataaattaaaagaattggaaatagaaaaagagagaaaaattttatcagatttgtttaaagctatagcattgggtagaaaagacatcgctttaggatatgaagaagttaaaaaatatttggaacaaggactagttcaaaaaataattgttatggaggattttcccaaattggatgaaatattggaattggcagaaaaacataatgtagatgtagaaataattgaaggaggaacaacagaagcagaacaatttagaccaattggtatagcagcttttctatattacgcatcagagtagagaagactcatcattaatcagttgtcctcgacttcttcattaatattacattctctatatggggagtattaggaaacatatctaaaggttgcatgtcaattattttataacctttcaatttatttatatctcttttttgagtataaggattgcatgaaacataaactatagtatcggggtttattttttcgatatactctatagccttatttgttaaacctgctcttggtgggtctacaattattttgttagcctttattattggagctttttcgacaggcgaagcaataaattctgcatctatattgtttatagaggcatttagtttggccatctctacagcttcttccacaatttctataccaattactttcttaacttcattagctatttgcaatgaaaacaatccaaccccgctatacaaatctaaaacaacatcattttcagagggttctaaaaattcctttactatttttactaagtttacagcttggtaggaattagtttgaaaaaagctattaggcgatatgtaatattctatatccaatattcgttctctcaaaaatttgcttccataataatggtaaagtttttcgcttattgatacatctcctaaatcctctctaattccccaatatactgaagtaaccaaatcttttatgttttcgataaaatcccacaattcctcaaatttctttcttttatatgttattatatggatcatcctttctttagtaaatttgccctcccttatcactaaatatctaagaaaacctgtgtgcttaactgtgtcccaactaggtattttgtatttttctatgaatttgttaaactcatttattattatttctgcttcttttgaaagcattttgcattcttttattggaatataaccataccatttgccaggctcttttaaggaaaccttattatatatagggtaatccatcctatttcgataatagatagtttttggcgaaggaataatatctttatcatagccaaacaaattttctataacttttttcttaaattccaattggtattggtaatccattaatccccatagacaaccaccacattttcctaaatgggcacaatatttattggatgtcctataagggctttcctcaattatttttactatttccccaattttctttttccctttccttctaacttttacctctactatatctccagggtaagcaaatggaacatgtatattattgcccactccatagcctttctcgtcaaacccctctatatatattttcatagccataggaataacataccaatatttaaagaaagtactatcaaataggaaatacaaaaatttatattttgtgaacatctagatatctatgacagtatacataaaaccagagattaattacaaaaaacctattgtattggatgatttctattttttcgatagaccttattctgctttagaaaagaaaaagctattctttgttcccactgtctatagaatagaccttgtaaaaccaatgtctatatattatagcactactaacaaagagagcagtaatggcaaagatataccatggatttggattctcaacttctatcaatattatttttctaagcacagcgataaaagcggcttcaactaaggcatctaaatacaaatcttgattttttatgtatatcaaaaccgttctcaaaagctctattaaaactaaaactaatagaatgtctccaagcatgttttttatgtttactgcttcgtatcttgaaaacgggttagtatacaacaaaaatgctatataataaagcagtttaaatattattaggattattagaatagacaatatcgcggcgagcaaaagcttgaaatattttaatatgtccattaatataaaatctttaaactattaaaaattgctaaagagtgctatacttatacaacacattaacttcgagaaaagaggcatttattccattggaagagccattcgtaaaaatgtatacctgtggggttactccttatgataaagcacatgtgggacatttaagaacttatttagttacggatttgttaagaagaatactaagatttttgggctattatgatatagcagtaaccaattttacagatatagatgataaaataataaaaaaatcgcaagaattaaataaagattggaaggaaattgttgaagaaaacattaaatatgtgttcgatgttctaaaagaactaaaagttttgcccttctacgtttatccaagggttacttaccatatagatgatatagctaatgcggttaaatctttattagataggggttatgcatacaaaggaaagtatagcatttattttgatgtagataaatatccatattatggtcaattatccggaataaaaagcaaaaaagaatgggaacaagaaaagcatttattagaagataagaaaaacccatatgattttgctttatggaaatttaaacaaccaggcgaaccatattggaatactattgtaggggaaggtagacctggttggcatatagaatgttctgttatgtcttccaaatatttaggagaaagatttgatatccatttggggggaagtgatttgatatttccacatcatgaaaatgaaatagcgcaaagcgaaaccttatataatgtgcatccatgggttagatattgggtccatattgggatggttcaaataaatggagaaaaaatgtctaaaagtttaggaaatataattgaggctaaagaatttatcaaaaagtacaaacccgaatttgtaaggtttttcctattgtctacccattataggaaaccattggatattagcgaagaaaatatagagcaagctcaaactatttacaaaaaattgaccgatgcttacaataccgctaaaagtattgttgaaaacgaagtttcctataggtttgacaaagatgtaagaattatattagattattatagagagatgattaaagcgtttttagatgatatgaatacgccaacagcaatagcgagcctaaacaaaatagtttccatttttaatcaaaatccagaataccctatagcttatttaacattgagggcattcgaagatttcaatagaataatgaatgtgtggtttgaaaaaccaatagatttagatataattaacgaaataatagagattagaaacatgttaagaagagaaaagcaatatgaattggcagacaaaataagagatatattacaaaagaaaggtataaaaattaaagattacaaagataaaaccgtctggtatgccgatatttaaaaatagattcgtctttagcgaagcgtatgtaccatctaaaatattacatagagatgacgaaatatctttgatatatactgcaatttccccaataaaacaaggagaaaaaccattaaacatatttatttatgggcaaaccggcacaggaaaaacattagttaccaaatatgttttatcaaaaataggagattacatatatattaattgcaagtttgctggcataacaaaaaggatagaaagctttattagggaattctctttacaattaggccaagatttttatgatttgaccgatgttatacaatatataagagataaaaaattaataattgtgtttgatgaggttgaccaactatcaaaagatttgggagacgaaatattatatacttttacgagagccccaggaaatattggaattataggtatttcaaacaatatattttttgttgataggctcgatccaagggttagatcttctttaagcgaattagagatattattcaaaccatacaatgctttgcaattaagagatatattattggaaagagccaaagagggattatacgaaaatagttatgatttggcagcgatatcatacatagcagcagtcactgccagggaatacggcgatgctaggagagcaattaatttattaagattggccggagaaattgcggagcgtaaaggtaaaaataaaatagaattggaagatgcaaaagaagctatagaattggaagagaaagataaagtaaaattcgttattgaatctttgcctttgcaatccaaattagtattaaaatctattgctgaactaaaagacacaacattgggaaaagcttatgaactatattatagaaaaagcttagaaaaaagtgttactcccattacatttagaaggtttgtagaaatagtaaacgatttagaaactttaggattagtatcaattgattttgctttattaaatgggaaaagagttagaaaggtaaaaacctttattagtccgaaaattattgatctataaggcaggcctttttgtaataatggattgtcgcatttgataaattataaacaaaacatttttcttttgtaataatagtgccattcattatgccttcaaattggttttctgttacttttatatcgtttttggatagcaatttgtttacatagaatatcatttcatacaaattccaaccgaattgcagttttttagaagtgtttttttctaaattggttattttcgcttccgctttattggaaatttgcccttttatatggaaggagcctttttttgtatataaatagccatcgtaaactatagagcccaaaacataggaataatttagttttaatgtataattttcttttgtatctttatattctatataacctttttgatttgtaatgggatcgaaatataacatattagtttctacattgttttccaatattgtaggagctttcccttttttgttaaataatcttaatccagcatagaatgaaagaacgaaaactgaaatataaaatagaattttacctcctagccttttcaattttaccttttcttagcaattctaatggttgtccattaactaggtatactttatatcttactcccggtatgtctcccatagatctgccttgcctacctcttataccgactattaatacttcgtcgtgctcgtcaataacttttatagccccatctccaggagtaaacgctgttactactttgccattcttctttagttgtactctaactactttaattctaccggaattaggctgccttctctctacatcggttttctctaatactataccagatgccattggggccccttctaatgggtcatacttctcttttattctaagcatccttcttacatacctatagtcattccatctaaattttttccttatttttttcaatttcctaccagcgaataacccatttggtaccactcataaagcacatgaaatattttaaaaatctataattgtcatcttaatgactatagtagtacctgatacctctgcgcttatagaaaaggctatatctaaaatgataaaagaaaacaaaatcaaaccttcaaaaatagttatacataacgctactatcgcagaattggaacatcaagccaatgaaaatagagaaataggttatttaggattagaagaaatcgaaactctaaaagagatggccgaccaatatgggtttactgtagagttccaaggggaaagaccaaaagctgaagaaataatactggcaaaaaaaggagagatagataataaaattagagagttggctaaacaattgaatgctatattaattactgcagatagaacccaatattatgtagcaaaggttttaggaatccaggcaatatttttagaaaagccaaaaagagaaaaattgttgtttgagcaatattttgatgaaaatactatgagtgtacatttaaaagagggcttgcccccattggccaaaaaaggaactcctggtaaatgggagttagttagaataacggacaaacctttaacaaaaaacgatttagaagaaataataaaagagatcgctgaagaagctgttagcagagaagattcttatatagatattgagggcgaaaacattttagtagcacaaataggcaaatacagaattgtagcggttaaacctccattgagtgatgcaatagaagtaactatagtaagacccgttaagaaactatccttagaagattataaaattagagaagaattattagaaaggctaaaagaaaaagctcatggtattttaatagctggtgccccaggtatgggtaaaaccacattcgcccaggcattggctatgttctatgtaaaattaaacaaagtggtaaaaactatagaatccccaagagatatggatttgggaaaagaagtaacccaatattctttaactcaaggcaaaacccgagaaatatatgctttactattattagctagacctgattatgttttgtttgatgaagttagaacagaaagagatatcaaattgtttgcagatttaagattagcaggaataggaatgataggagtaatacatgcaaatagagcgatagatgctatacaaagatttataggaaaaatagaattgggtgtaatccctcaagtagttgacactgttatttttatagataagggccaaatagccaaagtatatacattagatatggttgttaaagtccctactggaatgaaggaagaagatttggcgagacccgtaatagaagttagagatctatatacaggcaaattggaatatgaaatttatgtttttggagaggaaactgttgtaatgcccatacatggcgagcaaatgccaaatgctttagcgagattggcaaaaatcgctatagagaatgaaataaagagatttctaaaaacagatgtaaaagtagaaatagagtccccaaatagagttacagtttatgttccaaaagggtatagaaagagactagtaggaaaaaggggaaaaacaattgaaagctttgaaaaaatgttgggtgtaagaataactgtaaaagagataggcgaagaagagccagagtttaacataaaggaaacaaacaaatatctaataatagagttacccccagaatattatagaagggttgtaactattctaatcaatggaagaccctttgtagacgctatagtagggaaagatggaaaaataaaaatcgctaaaaatagtgatttaggtaaagtactatacaatgctctaaaaggtggagcaaaaattgatatagagcttaaataatcagccggtttgagaatcttcatctctcgggcggggataatttcatcatgcgcccgccgggattcgaacccgggtcacgggcttggaaggcccgcatcctaccactagactacgggcgcagagatagaaatgaaaactatttaaaaatatttgaaatttatcttaatggtttggctgtataaaattttaacaacccttgaaaaaaagctgtataataatataaataaattggaatatgcaggcgcaaacgatataaataatatggttgcattgcaataccaaacatcggatatggatttagaagtttatttgaaaaaagacaatttttatgccgttactaaaaagggcttagataaatccacaatactcaaaaaaatagaatatacaaaactatttccattttttgacaatagaacgccattagaaagagaaatagaattggccgattgggtaaaagaaatgatagtaaacaggtttttatataacattagaaccgatacaatggggattagaaatgaagacgatttaataatagcgtacaaagccggcaaattcgttttaccaatctattttcaattatatataagaccaacggatgaaggttataaagagattagagaacttttagaaaaaaacggattgaaaaggggaaaatatagggtaatacccatgccattattaaaatttttaaaagagagagaataactattttgccgccgtgcccgagcggccaaaggggtcgggctgcagacccgatggtcgggggttcgaatccccccggcggcttagcattagtataataacagttagcccaataagaaagcttagaaaagcgccttccaattggaacactttaataaaatatagagagcttaacaaagttgctataatccctattaataaagtttttatctttagctttaggaattctatggcatatatatagccaaaatacgctcttacaataactaaaaatactacataaattaagtagggcaatactattttgtatttgggattaatcaaagaaaaagctatatctattattggaggtgcaaagagataaaatagtatagatactattaggggtaaaagcaacaaatcaactattgggtttttgtttttcactctatgcaaaaatatatcggtacttgaagacacatgtaacactactgaagaaaaccccaaaactaaactgtatatcgccgcttctttttttaggttattcaataataaaactgcttgtggtatcaaaggtaaaaccatcattaacaaaactattatatgggttttttctaaaaaacaaacttttggttttccaacaattaaataataaaagggggctaaactaacaaaataggctaaaaaaatatttatatccttggttagcaaaaaaattagcaaacttataatagagaatagtaaaagcttatggaattgcgattttttaattaatagggttctcccgattgttaaggagatttgggctataaagaataccaaaccaactgtggcccatttctctataaaggacaaaattagaaatattatagttccagcaattaaataaaatctaatgcattccaatttattattttgatgccaaagatttatgcttccttcgtaagaaaatattaatcccgctttagcaccaagagctttgaaaaaagagattactccatatatattaggaggaaattccttaattaataataaagtgacgaaagcgtttaataaataactaatcataaaagatagtctatcataaataaagtctttcattagatttttgaatgtggatatttattgtttatgcgatagccctttatgtattgttaaaaaagtgggttaactatagtatagaaaaaaatttgtatggaatagacaaacataaaaacataaaggttggggaaagcgctggtacagttattggcattctattttctttggttttggcatggttaggttattataaaatggcctttgcttctctattggcaacatttttagggtatttagatgatacattggttttttcgcaaaaaaccaaactagtattgcctgtcctaattttaatacctttccatttctttgattttaatattctctacattttatttatgatattttctttcaatatatttaacatattcgctggatataacggtttagagagtgggaccgcattattgtatgggctaacattaacattatatttttatggatctgatctgtttacaatagcactattgtttagtttatcctcccttattttgtatttatttaacagatatcccgctaagctatttgttggggatagctttacatatttcgcgggcacagttatagggctattaactataaatacgcacaattttgtaatgtatttaacttatttacctttagtaatacatttcttattgtatattaaatcctatatcgacaaaggaaagagcacaagcgcttttgcgaaagtgaaagataattgtttatattatgatgaaaaaccctatcatcttacccaattaataataaagcttttacaaaaaagaataaaatgcattagagaagattatgttgtggcggttgctttaactattatagcaatcaataatatagtttggttgttgttagcaaaatttttaaatataccattctaggtttcgtgggagggccatagcggcccgggaaccacccgtacccatctcgaacacggaagttaagccgggccgcgtcccgagtggtactgccccgcgaaggggtgggaagctcgggatgccctcccgctatctatattttacaaaataagataaaacgctcgctaaaaatagaacagaagttttaatgttgatataaattcccacactaagcaatgcgccaataattattaacaacaaatctaatcctcctccttgtcctaccaataaacttaacttaaacattaaaacataaggaataatgtttagcaatattattgggatataccagctttcctctaaataaggaattaaatatatgaaatggctcgccattaacaaataatgccccgctattgcatacaaatattgagtagataattctaaattagttaaagaaactaacccaactaacaataaagagctaacaaaaaatctatttttatcgccaaatgattcataatatagaataaacaaaaccgaaatcaaaaatgcggttgctatcaaaataataaaagagctggcagaaaagtataatagaaccaaacttaaaactaaatagaatactaaagcagcattgctttttgataattcttcaaaaagctggcccattgttatagaaaatataaataataaagcggttttttgagaccacactggggaaagcaattgcaatatattggctatttcattataattaaaattgtccatttttggcattgtgaaaaatcctaaaactatggatagaactaataacaaagcagaaataaccaaggaattttcatgtttggattttgctatagtgattatagatgtaataacattagcgatccatagtataaataaagaagagctatctattattgtatagcttgtatctcccattctaattagaataggcaataaagtatctaccaacaaaaaagctggcaacaatattgaagaagctcttgtaaaacctagcaaaaatatggtaaaaaacaaatataaggataatgcttgtattattgggaaaggtaaatgcaaagcatttagtagtataaacaatatagtaaacaaaccaaaccctatgaaataaccaatagcgtttcctattcttttccctacataatatatgaaagagcccataagtaatgcaaatagtatagaccttactattgggactggagctagttttatataaaaatccccgtaaagggttttgaatgcattatctaacacacaaaaaggaggagtttgtataacttgttctaagggtgtttttattttatataatttatgataacaataaccgttttcgactttttcacaataattatatatagaaggataaccgctttttatataatagtatgttttacaatccaagttagctaaattaaataaagtattctcaaagctatgcttagcatacaatagtttagcataattgcattcatctagtaataaaattttatatgacgcattttctaatgagggttttaacccattgtatggcactaacaaatatatactatccttattttgatagaaagcgaaataatcataaggtattttgaatgttactttaaaggttttatcttttttgttgtattcgcatccaattacagggcctttaagtttattgcaatcaaaatattcatttttttctaattttattgtaatattaagggttttttcttttacatcgaaattacaaatcatatgaaatctgttagttttttgtttatttcaaagggccatttctttcttatataaggttttaatattctataatattgttccaaagcttttctagttcttttatctgaaggataaccagaaccaaaatctataccagtttgttcttttattttttctatttctctatctcttataacttttgctacaatagatgctgctgcaactaatgggtcttcttctcctttatttttggtaataatttttaccctctttttcaaatatttcaaaatccttagtttataattttcaggtctttctggagaatcaataactatatgggatatttcgtcctcaatactattaattaagttcgctgttaccttcgcttcaagttcatttaagttatatctatctattaaagaagggctaactatttcgtattttactaagctatttttgactatctcattaaatagttcttctctttgttcttttgttaatagtttagaatcttttactcccaattcttttaagtatccagaatctccaataactaaagcaataaccattggcccaataattggacccctccctgcttcgtcaactcctccatatcgcatattcgtataaaactatatcattccttttatatattatagtgccttttttgtattcaatataatccaaatcctcggcaattatccaatccttcttattatataagtattggtatatttcaaacaaagagccctggtaccttggactaacatgtataaaaactaacaatttagagttgctttcatcccttattctaaaagcgtcgctaattgtggaatggtaatgctcgatagctttatctttgtctttatctaaaaaagccaattcgtgaaatattatatcgctatctctagcaaaatctatgaattgctctctaaaaagggtatctgttattaaagtaaactttaagcctttttgtatataagtaaactctttagggtctaatgttataccatttattgttacggatttgccttcttttagtttggccaatttagggttagatcttatattgtatttagctaatttctctttatttatttttattttgtccttttctttgaaagaataggccaaaactggtacttggtgtatgccatagatagattctatataaaaaggcccaaaatctattttggtttcgccaatctcttttatttttaacgggaaatttatatttatagcgaagctatctataattttttctataacttctttaatgcctttaggtccaaaaattgttaactctctattataatcttggtttgacaaacttaatagaattcctggtaagcccaaaatgtggtctccatgtatatgggttagaaatatataatctatttgggtaggagataaatttaacaaacgcatttgcctttgtgtattttctccagcatcaaataaaatgccctttcccatatagttaacaaaaatagaaagggtttgtctatattttgtaggcatgttccccccagttcccaatatataaatcatagaaacctttataaattaagtttaaattctatcagatgatgctattacaaacagagaaggcccttagactattggaacaatataataccataactatcttagttcctagggaatacactaaatccaaaataaaagaattctttgagaaaaaaggctacaaagttaaaaaagttaacactttaataacaaagaaagggctaaaaaaggcatatgtcagatttaaagaggaaggtgtagctagaaaagtagccgaagagttgggaggtttataaatttttagttttcaatatttaatggattggaaagacctattaaaagaaaaagatccaaatttgtttttggccttgcaatctctattagaagaagtaaaggaatataaagatatttatttaaaagcaaaaaacccctcaatagcacaattatggatagctttagctattttatataaaaagcattctaaaaagaagaaaaaagaaacaatccctaaggatttggaggaaaaattttagctataattgagaacaaaaagtaaggcgcaaaaggataaccatctcttattggaatactaatatttgtttgttttagtttattcaagagctttttatttaaaataggttttttgtatactttatcccaaactattgtgccttctactatatcgccctcttccaaataatcaggttttaccattattattttgttttttagtgtgcctttgaaataatagaataatgctaacatagtaattaaaattcgaaacaaaatgcttttgtaaaatagtattaggaataaccatattttatttatgttaactaatacataccacatatacaaatacaaaccgtaaatattgtttattcctattggagaataaaacgaataggcaattgctaaataataatcccctatggcgaatagtttagcctttgttgctatgtaaaataaaattgctgtaactattgctaaaccgattctaaaccaattgttagtaactatattatataatagcattgtcactatatataaatctactgactcgctaattgttacttttttctttatatctgttattgtataaagaagaaaagctaataggtcgaccatagttttttcctatttgcctctaattgctttatttcatatcccataaactctgcagcagttataaaattgtctctaaaatatttcctatagtttatatcccttaataaatggtggtctattattacagtttttatattagataacaaatccaatgttttttctattattgggtcatatttaatgtaagttggaggcccagaaataaaaactattttaggatcataatctaatatttttttcatatcctctatatttaagcattgggaatcacttgcaaaaataaaatccttaatcctaattgccaaaactttggagaatttcgaattcttatagccatgccatagagtaaaggtttcaatatcttcatcaaatttatattcgtcaattaatataggttttacttctttgtaaaaaagttttcccctttgttgttgagaataattcatattaacgaaattcttagcatagaccgttttagtttttagtatgtctattattggatctcctggcctaggaacatggtcataatggtaatgggtaataaatactgtatctactttttttaattcctctattattctttttttgccctcttccatagcttttaattctattgggtgtgggggcaagccatatctctttggaccaaccgcaatagatggatctatcataatattatctataacagtactcatacttcttgtggaaaaagaatctgcgttaattatttttattttcatattccttggctttaacccaattgcctttgcttaaaactaaatggtttgcacttaatgttatcccatttatttcatataaatcggtctcggtttcatgttttattattgaatatactttaacccatctttctccatcatatacatacaaatctggagggaaagcataatgtttctcccctatttgaaaaccggcatagtatttgttaaacaaatcgcttagcttttctttcttttttataccattttctataacctctatttcagtatccattatagaatctccataaattactttgaatccttcttcttcggccctttttaatatataattaatgtatttcctgccccaagctgctactgccgcagcacagtctatgcaataccatctcgcatttgggaaacccatatagccataggttgcattaattattattttcaatactgcttgcttagcatttataattttatattcttcactatccctatctagttctttcagttttctcttaagttctagcctttttgtatacaaatgctctaataccgttggaataaacccttttacttttttgcaaaaccacacatattttttctcattatttattatcgcttctaccccattttgtttacaatcatcatgctcacaatatattgtgcctggagaaacattatgctctaatataattgaaggatacagagaagcgaaatccagtacagctaaattctcatacaaaccgggttttggttcgtaaacgaatgctcctgcataggtatttaattttcttctctctacttcttccatttttggtttgttaggcacaatttcattatattttctgctttttttgattagataccattcaactatattactatagctaaacctagatacatcaaataatggttggttaaccaatcttgctaattccaataaatcattttcatagtatttgaatagcttatatgttaattcggcatcttttaaattgtattcgaacactttgttataattgcctatggcccaatcatataacatgttttcataatcataaattttctcctctccaagaatttctttagctacttcatttaatgaatatgtttgggtagacaattgggttttatatatggtagtaattgttttatacaaatctacatgtgcgctttccctaaaattataagtaggctcttttttgttaaccaattttattggtagccttatattgtataaagaagcccttttcactaaaaagtctatatcgaaattatccccattgtatgtaactattatgtctggttttaagctttctattatttcgacaaatttctcaattaattcatattcggtattaacttttatagttggttctcctttgtaagagataaccccttcgtaattgtctccataaagggctatagatattattttgtctttttcaggattagggaaagcctcactgtaaacttctatatcaaaagctaaaaccgatggcttagtcttttcatacaatctttttatactttgtgcttttattctaactttgttagaggtagataataaaattttgccttctacctcaaaccattcaaaaggctctatccctttatctattaaaaacttcctataaacatttatatcggtttcgtattttttatagcccttttctttaatgaattcttttagtattggataatgtttatgcaaaacatatactttataaacatcttttggtttttctatatatttcttttgctcctttgtatattcgatttttatttttttgttgttagcgaattcttctaaatcctttatatcgccttcaaaatagaaataccatttgtatggaattataacttcacaagctctattattttcgtctttacctattaaaattacctcgtctaaaggggtgttctctatattaatccaataacattttagcacgctatacccttcttcctcttttaccgccttttcttctacaaccatcgtggggagttggtgtaacatcctctataatccctattttcaatccttctcttgctaatgtctttattgctgcacttgcccctggtccaggaatccaaggaccattatgcccacctggggctctaacctttatatgtaaaccggtaatacctctttcttttgctaatgctgctgctctttttgctgctagtatagctgcagtaggggaaccttctaatctatcggcatttacaaccatacctccagagccaacagcaatagtctctgccccagttatatcggttatatgaattattgtgttattctcagaggaatatatatgtgctactccccatcgctcttttgccatacgagtaagctatagttctatttaataatgctttaaacagaataatattaccatcgaatgggggaggatccctctttcctaggaaacaagaagttctctattaatgtatacaaattacctacaggggatttgctaataattccagattatatatcgaaggaagcacaggagaaattgcatcaatatttcgtcgagggcattaattcatataaagtaaggctagagaaactatttcccgaagttaaagtaaattcctgctatactgttgatgtgttgccttctaattgtccccatcctatagtgccaatgctttcggtatatctaaatatagatcacaaaccctttataatatatggtataggagaacataacgcagcaagacatattgaggctttccataaaaaagttaataataggtctttgcttaccggaataaaagatccaaaatatggtattccaattagcttatcttgggtatggggagaagttctaacatggtttttgtccgataaaccagaactaatggattatagagatcttgtatacgcagatcgcatatacaaaatggatgttagcattgggcaccatggagatattgaaagtattaaacaattagaaaaatctgtaaggggagaaggggagcatgtggataatatttttggagttgcattagccaaacaattagatagggaagggtatgatttagagtatgtagtaaaaagagtaaaagagaagcctttcttaactttagaagatatggataaaatagaaaaaagactatcaattgatgctccatcgatattgaacattataaaagcagtggtcaaagcaaaagaagatcgtaactacatatgatcaggcctaaaataattaaattatcggacaaagacgaattaatagcatctaatcctaatatagataaagcaaccaaagcatacaaaatggctaaaccacatgtagatacaattagagattatttgcctgcagaaaggggattatgtattgctgaaccacagtatgttaaactatgttacggttatttagtgaaattaccaaaagagttttctattttaccatataaaatagttagagatgctgtatatacatctttattggataatggtattgttatagaagatagcgaagaacgaatagagggcaatactttatatagggataaatttaacgcatcggcattggcttggctattaaccaaacatggaaataataaaatgggcttttctagggaatatctaactcttcgcgaaatgctctatacaaacaaaactataaaaggtagagagaaaaccttttcttatgtgcttggatcattattaggaagtgctttagaaaggaaaaatgttgatttcagagatatactagattctttaccaattataatagaagatagcttagaaataattgaagaagaaagagctaaaaaatatccatactataggaatatattacctaacccaccagcaaatacattgaaagcttgggtcgctttctctaaaaagtatctaagataaatttttggctaaaaccaaaaaccttataaataatggcaataaataaatggggtttttcttgtattttttggccaaatctttgcatttatctctacaaacaaattgaacatattgagttaggttgccttttcctatatgggatctttcccagtctattagtatgacccttggccctttaaggaatatatgttttataggcctatgcatttcttccttttttattttaattaaatccaaaaaaaccattataaagaaggttactatcaaagtatatagtttttcccatggctttaggtttaaaaaaggtttgcccgcattttccataattagtataagctttttatcatcgctatacaaaagcttgggcataaaccaaaacctttttgataggaaaaatttttcttttaaataattatatttgtatttgtgttgctttatggctatatttttgtataaaattactttactgtgcttccccgaaataacaactaccataatattccataaaggttttcaaatcactaatagtataaggattagtaacatcttctatttctccattgtaagatctctttattgcattaatatttttggtttcactaataggtttgccatcaattaattgtatatattggtttaaaccatctttattaaggccaatctggaaaaccctataagtctttaccccttctttagtaattagttggtaatatttctcgcattttatatttatgggccaccaccagcattttactaataagttatactcttttttgtctatatattttattttgaaccaccttttacaataatccgaaactaaaaactctttataatcatcaaagcttttagcagttttacataggttttggcatagtacttttattttttctatatcatcaatgctaaacccttttattttagaaagctgtgattgggatttagaaaaaaacataaatactagcgataaaactagcaaagataatatggcataaacaattagatgtagggataattctatagatctatccaatttgtccctttctaaactttattacggccattcttgtaaaaacataatagcatttcttacatctatatatagcgccggccatatccatcatatatggtttgaattgatgaattacttctacttcttcgctaccacatttagggcatacaactttcattcataaaactatgggttgtatttaaatttagttatgtctatagtgattggatttagtatatcgaacacattagtatgtgtaacaataatcgctatccctttgaaattctttaggtaatcaattattttttgtagattatttttatctaaatgtgtttccacttcatccaatagcaaaactttaggatttaagttttttgttattagaaagtcaattattcttgattcgcccccagataattctttgaatagaaatttgtctctaaacctatctaattcaggatctttgatatttaatgcatacaaaatgtcttttaaataacctacttcgttaggcaaaacttgggataaatagaatatgccttttttagctctttcatataaaggcaaaccgtgtattggttctccattaaatattatatggccatctattttgtattcaggaaaaccggcgatagtttttaatagagttgttttcccagagccgtttggaccaactattttgtaaaaaccattagtaaattccaaatcaacatttagcaatggtttattttttacatatattataccctttatagataaatccattcaatataacaatgttatagaatataaatttattggtattgcgatataattttttgctttacctcttcgaaatggtttggcaattgctctgggtctaagccttcttttaaatagcgagagaattgctttttgtatagctcttcgttctcttttaacattttcgcgtaattagcgatgtgttcccctctaattctatcttcgcttggcaatatagtttcgctatgtggtatatttaaaccagcgtctaaagcacctttcaatactgcatataaagcgttaccttttgtggatttgtacctacctatatctaatacagcctctttgtaacctctctttaacgcttcatacccagcaattaaaccaaccaaatatgctgatggtaggtttcctctatgtcctttccatccatattttttcaacacattagaatggatagtaaatataactctatctcctttaggatcatattctactaattgagctaagatatttgaattaaaccttcttactactaacctgggtttgcctgaaagtaaaagctttagcctttttctatagacggttttgccttctcgccttcttctaaagggtactctatatctagggccatgtgccattcaacgcttttcatcaaatatttataaagtataaatccattgcctcaacgtttatggagttacttgaggaaatattcaaatatatagataaaaacaaaataataggctatcgattcgaagggccaaaagtagtgctatttacaagagacaaagagcttttagtaaaagccccacagatattacaagagattgccaaaaaagtaaggagaagaatacatattagatatgatccaagacttctaaaggaggaaccagaaaaaatagaaaaactaataccaaaagaagcaggattgcaaagaatttatttcgaaaagggaaggggcatagtaaatatagaggttttattccctgaaaagatagatttgaatacaataaataaaataaaagaagaaacactttggttccctagaatatatagaagcccattgattagatcgaaaactatcgatatggttagagcttatatgttccaacattctaacgaaagaataaagcttttgcatgaaataggtaaaaatattagtgaaaagtggtctatacaaaaaggacaaacctgggttagagtaagctttttagggggagcatcccaagttgggaggtctgcattgttattacaaacgaaagagagcagaatactattagattttggggttgatttgtctttacctccaaacaacaaaaatgcttaccccattgtagaattgccagaatttgatgttaaagaattagacgctgtagtaattacccatgcacatttagaccatgtaggatttgtgccatttttatataaaatgggctacaagggcccggtatatttaacacccccaacattagatatcgctactcttagtttgttagattatttaagaatagccaatgaaaacaatgtcaaactatttagcggggacgatataagaaattttgtaaagcattctattactatagaatatggccaaactacagacatcgcttctgatgtaaaattaactttttacaatgcgggccatatactaggatcggcattggcccatctaaatatagccaatggttattctaatgtattatatactggggattataaggttaaaccaactttcctatttgatggtgctcaaatcccacaagcaaaagtcaatatcgctattactgaatcaacctatggagatacctatcataaacctagagaagaagtagaaaaagaatttttatcatttgtaaaagaggtaataaaaagaaaaggcaaactattaatacctgttttaggcgtaggaagagcccaagagatattgtatttattggttaaatcaataagggctaacaaattagatgaagtccctatatatttagatggtgtagtatgggaaattactgctatacacacagcttatcccgaatatctcaaagaggaaattagaaacaaaatattagctgggaaaaacccatttattgataaatttgttcatagggctccaagaaatagagaggaaatagtttattcaacagaaccatctataatattggctacttctggtatgctagttggaggcccatctgtgcaatacctaaagctaatggcagaagatcctaaaaacgccatagcttttgttagctatcaagggcctaacacattaggaagacaaatacaaagcggggtaagagaagtagaaatagatggccaattaataaaaataaacttagaagtaagatcttttgaaggtttttctggccatgccgataaaggggaaatagaatctttcttaagaagggttagaccaggcagagtagtaataaaccatggagagagaagcaaagtattgcatttggcttcttatttaagaaaaaagcttaatgtagaaaccaacgccccaaggaatatggatgcactagcattaaggatataatatataacaccgctatttcgtatgaaccccaaggaagaggcattaaaagtactaaaagaagcagacgaagtagccaatatagatgtgtacgaataccttaaagaaccagaaagggttgtagaaacttattttccagctagaacaaagaatggtatagaatatttcaaaggttatagagttcaatacaataccgctttaggccccgccaaagggggtattaggtttagccccacagtaacaaaagaggaagtagaagcattagcactatggatggtaattaagaacgctttattgggattgccctttggtggaggcaaaggaggagtagtagtaaaccccaaagaatatgaagaatgggaattagaaaacattgctagagggtttgttaggtctatagcagagtttattggagaagacaaagatattcctgccccagatgtgtatactaatgaaagaattatggcttatatgatggatgaatacgaaaaaatagtaagacataaggcatttggagttattacgggtaagcccataattttagggggtaaccccgtaagaaatattgccacatctttagggggatattatgtattaaatgaagcagtaaaattgaaaaaagttgaaaacactgtagcaatacaagggtttggaaatgctggacaaggtattgccaagctattagatggccaatataaaattgttgcagtaagcgattctaagggaggaatttattgtaaagatgggatagatatagaaaaactaattgaagtaaaaaagaaaaccggctctgttataaactatgaaggttgtgaaaaaattactaacgaacaattattagaattagatgttggcatattaattcccgctgcaatagagggagtaataacaaaacaaaatgctgacaaaataaaagctaaaataatattagaattggctaatggccctactacaagggaagcagataaaatattatacgaaaaaggagtattagtattacccgatgtattagccaatgctgggggtgtaacagtaagctatatagaatgggttggcaacaaaagagggatgccctttaatgaaaaagaaacaaaggaattattaaaggaaaagatggtacatgcatttctagatgttttagaagtatcgaacaaatacaatattgacatgcgtttagcatcctatattatagcattagaaagggtaaagcaagctatgcgctatagaggtttaatatagttctataaaattttgaatggacaaactatattttggccccgcaggtataccaaatagtgctgaaaaaagagacttattaaatggacttaaaacagttaaaaatttaggattagatgcgatggaattagaattcgtatatggtgtaagatacaacccaagggttttacctttagttaaagaattcgcccaaaaaaataatatagtacttacggcccatgctccatattatattaatttagctgcaaaagaaaaggaaaaaatagaaaaaagcattaagtatatcctagatactgccagagttttaaatgaactaaatggttatagcatagtatttcatcctggctattatatgaaaagagatcctaaagaggtttataagatagtgaaagaaaatttggccaaagtattagaaatggcaaaccaagaaggaatcaaagtatggattagaccagaaactatggatttaccttcaaggtttggctctttagaagaaacgtttgaattagctagagaattgggaacattgccttgtatagattttgcccatctaagatatagatataaaaacaataaacccgaattctttagacaagttttagaaaaatatgaagaatattttggtaaagaaggtttaaagaatatgcatatccatatgtccggtataaacctagatccaagagcatcgcacaaaaatttaaaagaatccgatatgccatggcaagaaatattagatttactaaaagaatttaatgctaaaggagtagtaattagcgaatcccctaatttggaagaagatgctataatgatgaaaaaatactatggatagccccgcccggattcgaaccggggtcacggggaccagagccccgcatgctaggccgctacaccacggggctagtatattcttttaattccatttaaaactttaaatagagtacaaaaccccaaaaatggatataaagcttagaaaaatagataagtatatttgggagataccaaaagaaggcaaaatgaatgttccagttagaatatacgctagcgataaacttatagaaaaaatgaaagaagatagaacattaatacaagcaagaaatgtatcgatgttgcctaaaatagttaaacacatggtagtaatgccggatggccatgaggggtatggcccaccaattgggggggtaggagcttttagcttggacaaccccccagtaatacctggcttcgttggttttgatataaattgtggggtaaggctattaagaacaaatctaactattgatgaaataaaggacaggttaaatttattggtaaatgaaatatttagaaatgttcctgctggtgtaggcgaaggggggaaactaaagctctctattgatgaactaaacaaagttttagactatggagtaaactgggcaatagataatggctttggttgggaagaagataggaatagaatcgaaagccatggttatttggattttgccgattctgatgcggtatctaatactgctaaacaaaggggtaaagaccaattaggcactataggttctggaaatcatttcctagaaatacaagtagtagaccaaatttacgatgaagagatagctaaagcttttggaatatatgaaaaaaatcaggttacagttttaatccataccggtagtagggggttaggccaccaagtggcatcggactatttaagattgttcgagaaaaaatacaaatatgatgtgccagatagagaattaatttatgcaccatatgatagtaaagatgcacaaaactatctaaaagcgatggccgctgcagctaattttgcttgggcaaatagacaattaattacctattgggtaaggaaaagctttgaaaaagtattaaggaaaaatatagaatcaataggtttagaaatagtttatgatttggcccataacatagcgaagttcgaagagcatacaatagatggcaaaaaacaaaaacttatagtttatagaaagggtgcaactagagcatttcccccagggcataaagaattgtggggcgaatacaaaaaatacggccaacctgtaataataccaggttcaatgggaacagcttcttatctattggtaggacaaccaaaagcgatggaactatcttttggttcttctgctcatggtgctgggagacaattatctagagtaaaggctaaaaagctatattcttattctgaagtaataagaaaactaagagaaatgggaataatagttaaatcaacaacaaaaactggagtattagaagaaatacctgaagcatacaaagatatagacgaagtagtaagggtaacccacgaattgggaataagcaaaattgttgcaaggtttagaccagtagcagtaattaaaggatgaacgaactggaatactatttagatcgagagtataaaaaattatctctaattctaaaagatgctaaaataaaaaagggagaaagatttattaaagcttattgggaagatataaaatatttctatcaaaaaggggaaaaggtaaaagctttcgaattggttatgtatatatggggaatactggattgcttatataatacaggttatttagaaataaacccttcccataaaaaatggtttaaagatatgtcatgatagttacaagtttagtgagtattacttaccatttggtggttaaaaatttttaaatgatgatgtcgtatactcgtatggcggaggagctaaaggttttccccaaggttttgaaattccttgtccttggtaaacctatccaatttaattttcatagtgtacagaaaggtgaggataaaactacactacagattgaagactgggagtacgggtacataaaatccgagtatgattctagaaataataaaataatattgaaatgggacaataataaatatgagaatggtttatcgtctccttttgaaataaaaaaggacaaggaaaaagatattgatataaaggcctatcgaaagatagttgataatggaccatggaaaacttttgaaaactgtccaataagggaagatgatataaacaaatacttgggtggtggtttttggcaagaaaatgagagcataattttggctgtagaaagaaaaggaaaattatactctctaaaattgaggggccccagtatagaggtaatgccagagcttgatggttcaaatgtttatgtaataagaactagtaagggagaccatgttgctgcaactttttatttttcttatccagatatgcctggaaagggagacatcttttttgataatttattaactcaattactctcttatgccccagcgcttcttcatttattattagaaaaagggtatatagatccaaataaagaatggtacctctattttgaagctaacgatgttaataataaaaggaagattcctagtagcttgttggacgcaatgtttcgtggttggtatgcttatgctagcaaaggcgaaaacaagctcgataaaacaataatatttacgccaagcccagtagacctttatcaaatgattcctaatttggcgttagcaaatactcttagggcaggtttgtattatactgcaaataaaattttagaagataataaagacaagcaatatggggacacaaaacaaggataacaaaatttttgtttttacgctgtaaatactataaagaaattctagcagctgtgtagtgtatttttgttaaaatatttaaatcataacattatactaccgtatgagggtaaagcttccctcaaaagtaaaccttgaaaaagtgctccaaaaggttaaaaccccaaagctaaccccagagaaaaaattagagatagcacaaaagctttatgaacatagcaatgtattaaaacccctattattaagcataggtttaggatatgctttgcctgctttgggtgaagagataaaaatcgataaagtcaaagtaactggaatagacaaaataaatccatacaaagatgcccatagcgaagaaaaagtaacatttactagagttttaccgaatgaagaacaaaccattgaattagaaataggtacaccaactgttactaccataccagttaattacaatggaacagaagagctaactgttacattaagtaatgatgtagtaaccttgaagtatacaatggatataacaaaaaccctaactgtatgggcccagaaaatcaaagggaccgtcacagatatttctacttcgattcgaaaagaattgtttggtcaaagtacaaaaaccatcacagaaatatttaacttagagggtgttgcttatgtcataaaagacggcacagctaatatattattagtattaaaagatatgggagaaaaagcagaatctctaataccatatttggccaaagcttatggttctgctgttaattatttgttacagtttgtgccaactattgaaaaatggagtagttccattaatgaatttctcggaataaatcccgatagcacacctgtgaaagatagcattaaaataagtaaagcgtggaacgaattaataaacaataccaaagcttatgtagagagaataaaaggaataaacggaggaatagagatggataagatattaccaaaaatgtcttttgtaaaggcggacggtgggatcgctaaaagaaattatattccattagtattaacagaaaaaatattggaaggggagcataaactagatatcacgcaagggaatggaggagtgcctccatataaaaatttcacagggccatacggttttttctattatataaaggaatggttagagccttccaagtttaacagcttaaaagaatacatatgggaagttatgtatcgttcagtaaggaatgcattaaccaaaaccggtttatataatccaaagcacttatatgctgttcctaacccctatgaggatctaaatatagaggatttggcaaaattaaaataaaatctttaaataataaattatttaccacttatgagtaatgaatatgttaaagtccccttatgtgctttaaaaaaggaatggttaaacaaatcccaaattatatatgagaaaaacaaaccttatgctttaattgataaaaacgatttggaaaaagctttgggttctccaataaaatgtatcgccccagggttaggagaatacataaaatctgtgggctcttatatagcggtaagccccatactaaataaattaacaaaattacaagacatatactctaatgaagccatgttcgtaagctgggtctatggggtatacccttctataaaagctttgtaccacacattaaaaaaagaatattctaaagctaaagaggatttagaagaaataaaattgttaccctatgttttacctgcatatttatcatgggttgctctaaaacagcatattaatcctaatatagatttagatgggccaaaccaatatttatttaatgtattaaacacatttgctaacctaatggctttaagcatttacataccaacagttgtaaaaatggaaatggccataaaagataaaataaaaaacatttccccattaaaagttataaaaaatatatatgccaaaccccagtaagtatttttaaataatcccttaaaggtatcgcatgcctagagagaaaccccacatcaatgtagtattcataggacatgtagaccatggtaagtctaccacagtaggtaggctaaaatatgatttaggtttaataccagagtccgaattggagaaaattagagaagaagctaaaaagtatggtaaggaggaattcgtatttgcttatctaatggatagacaaaaagaagagagagccagaggtgttacaattgatatagctcatacagaattggaaaccccacacaattacattacaattgttgacgctcctggccacaaagacttcgtaaagaacatgattactggagcgtctcaagcagatgcggcagtattagtagtagcagcagacgacggtgtacaagaacaaacccaagaacacgcagtattagcaagaacattcggtataaaccaaataattgtatacataaacaaaatggataaggttaactacgaccaaaaaagattcgaagaggtgaaaaaccaagtattaaaactattgaaaatgattggatacaaagatgaaaacattattgctgtaattcctggggcgtctttccatggagacaatgtagtaaagaaatctgacaaaatgccttggtacaatggaccaacattgtatgaagctttagacatgttaaaacccccacaattaccagttgatttgccattaagaataccaatacaaagcgcattatccataaaaggtattggtacagtattaacaggaagagtagagactggtaaactaaaaccaggtgacaaaataattgttttaccatccaagaagccaaacggtgcgattggggaagttaaatctatagaaatgcatcacaaaccattagaagaagcattgcctggagacaacataggttttagcgtaagaggtatcgaaaagggtgatgtaatgagaggagatgttgcaggccatttggataacccaccaacagttgcagaggagatagtagcgttaatacatgttatataccatccatctgcaataaccgttggttatgccccagtattacatgtacacacagcacatgtcccagtaaggtttgaagagctaagaggtaaagtaaaccccgcaactggacaagtaattgaagaaaacccgcaagcattaaggccaggtgaagcagcagtagtaaaattaaaaccattgaaaccagtagtaatagaaccattcgataaaatcccacaattaggaagattcgctattagagatatgggtagaactgtagcaatagggatcgcaagacaggtaacgcccaaacaaattgaaatcaaaaaataatgcctttcttaagaattaaaatttattctactgatttagaagaattaaatagggtagtagaaaaaataaaagagatagttaaacaaacaggtgtaaagatgagaggcccaatacctttaccaaccaaaatattaagagtcccagtattaagaattactgggcatagaggtacaaaaatatgggacacctaccaaatgagaatccatagaaggattatagatattgccacagatgatagaacaataaaattgttgatgagaactcctttaattactaaacccgaaaaaatacaaattcaactaaaatatattaaggataaaaacttataaattctttaaggccctatctttatgaaagttgtaccattagattttccattgggggaagcagtaaagttattagaggaagaagatttgctagctagcaaaaaagaagatactgttttagggactaacgaatatgttttactaaaaaaatctgcatggaaaatgccagttaatacaaaatttgagagttattctgtaccaatcccaacaatagatgggaaaaacgattacgaaattgcaaaactaatgtttgaaacaaggtttttagaattgccaaatgaagaccttacaaaatctatacattatacagatttgctaaaaaaatacaaagataaaataattactaacccaaccaggtattttggagactatatagatgtgcaagctagtgaaacggtattagcagtattgtatgaaatgaaaagacaaaaagtagaatacgctacagttttagagggggaaaaaccaattggtgtaatttctttgaaagatatattctctaaaataatatttccaaagaaaaagccaagagaaggtgaattcgttgacgaatatgataggccattaaaattaccaataagagaattcgtaaacgatgtagtaatagagaccgacgatataaaagaagtaatagagctaatgttagataaaaacgttagatctgtgcctttgttagttaatggcagatatgttggaacaattactgtggatgaaatattaaaagaaataggttacatagaagaaaagggcaaatattttatacatgtgcattctaatgtagatttgtatgaggatgattacgattatatagaaaaggaatttgtaagaaaagtatggagaaaatataaagactatttggaaaccgctactttatatttagacataaaaagggaaaaaggtgttttgcccgacaatatagaatatttttggcatgtttctgctaggttaataacaccaaaaggcaaattcgttgctagagtagtgggaccttctttgtatagcgctatcaaaatgattatgagagaactagtttatgaaataaagaaaaagaaagaagaatcgatagaattcgatatagtatgaaaagaactataattttattgctatctgctttagcattaggagtagctttatcgcaaattgcttttcttttagaaataaaattagacataaagaaaaccacagattatataattagaccatataaaacatcaaaaatcgttaatgctataattttagatggaaaccaatttgaagggcaggacaatcaaacatatgttattccattatatataaaaggaaacggaaaatacaaattttctatagaactaaaaaattttgatggtagcgctttattagctattggtttgttcgattcagataataaagagtttggcgaacaatataatataaaagcttattataacagcacaaatccaaaatatttcaatccttataaatatatcgtttgcaacaaagattgttctttattgtataacacaacaatagaaagcgaaaagcgttttgtgatccttttacatatatacaatataaatgagaacaaaactataacattatcgattagggcaaatgaggttccaaattaatgatttcttagatatagagtatagcgagcaatatccccaaaagatatctgaaatagagtgggcattcccttcaaagaaaaaatatgacgagtttttgggggaattattatttaatatccaattaatggatttaaaattatcaaaaaaacttagagaggaatattttgccactccctatagtccaatatcgaaaatgtttggccaaactgtaagtgggttattccaaaatgtttccaatttgggtaaactaattaacgatctaactagggcaataataagtcatatacaagaattgtatggtattagagagaaattggacataataaaagatgcctgtgcggatgagaactgtgaaaaactaaaatttttcataacaaaagatatggaaaaagaattcaaaaaaattgaagaaaaatatggagaaatagtttcagaaagaatgattaatcctgcagtattgtatttgaaaagcctatggttaaacaattctgaatatgggcaaagaataaaagctttaactaatatagcgccgagcataatagattattttaacgctatagagaatgaagaggaggcttacaaattgccaactaatgaaagaataaaaagaatcgtagcgagtgcaataaagcattttagaaaatggcttatacaatataacaaactattgaaagctagataccaaatgcaaaaagcttatttgaaaatgcagttagcttatttatatacttatctaaggatacttcaaccatatctaagagctttgtatgcttttaaccaaaaatatgtttcccctacagaaccgttaattaattttacaaacaaaatggtttgggaattagaatttcttatagaaatagacaaaaaaggcaaatttatcgcttgtttatgggttaaggtaaagctatctggttcgggtaatgagttaaatttgttacaaaacccctctgtaaatatattagtccaaactttggttttgagtgaagatgattacaaagaattagacagaaaaataaaccaagatataataatggcatttcaacaattgttaaatatgtctttagatcaattcaaagagttaataatatatatattcgaagacgaaattgataataatactattccagggttagagtggttaataactaaagaagacatagaaaagtataaaaacaaaaacaaaaaagaggagaaaaaagaagaaaaaaaggaagagaagaaagaggaaaaagaagagaagaaaaagaaatggtgcaatttgccaatattggatgctttgtgtgggttatatttggctttcaaaccattgttttccctattgcctaaaaaaccagagaaaaaagaggaaaagaaagaagaagaaaaagatgataaaaaagactgggaagaagctaaaaataaagctatagaaaaaactaacgacttgttcaaaactatagccaaaatagcagaattgccattaaaagatgctttataaaaattgaatgggtgtaaacttaaaagagatagtagatcctgtaaaaaaggaaatagagtttaagcaattgtttggaaaagttatagccattgatgctttcaatgctttataccaatttttattttctattagacaagatggagaacctttgagagatagcaaaggcaggataacctcccatctatctggtttgttctatagaactataaatttgttagaatatggtataaaaccaatctatgtttttgatggcacccccccaaaatttaaaattgttgcatgggaaaaaagaaaaaaacataaggaacaattagaaagcaaatacaaagaagcgttgaaaaaaggtaatatacaagaagcaataaaatatgcaaaaagcttgggcaaactagatagttatatggttgaagaagccaaaaaattgttggaagcgatgggtataccctatgtgcaagcccctagcgaaggggaagcagaagctgcttatttaactaaaaagggtgtttctgattattgtggtagccaagattatgactctctattgtttggttctccaagggttgttaggaatataactattagcgaaaaaagaaaattgccaggcaaaaatatttatgtggaagtaaaaccagaggtaatagagttagaagcagtattaaattattggaagataactagagaacaattaatagctattgccatgcttttaggaacagattataatgaaaaagtccctggcatagggccaaaaacagcaatagaaatagtaaaaaggttcggcgatccaataaaagttatagaatactataaaatacccaatggaaaggaaatattcgagtttttccttaaccccccggtcatagattttgaacctaaatggggaaaaccaaacaaagagctaatatttaaaattttggtagaagagcatgactttaacccagaaagagtagagagagcaatcgaaagattagaaaaagctcttaataagataaatcaaaaaactttatttagcttttttggtagttagacaaaatttttattatttcttcttttcctaaagcgattattaggctagcaatttttggcccttgttctttgtttattaacattttatatagcttggggtaaaactttttcggatctgtgtgctcttttattatattgtggattgatgtttgtatctcttccatatcataatgcttcattttttccaaatattcaataattttttccaatgcttgcaattcgtttttgtctaaaggtatagtaattctctcataatttggtttaatttttactctttctgggccataggttatagcccaatatgttgctttccttagcctttccaaattataatcctttaatggaatattaatcctatcaaaagctctttttatcctttctagtacttcttcttcaaattttattggtaaatgggtattaattagatattccttaggcaaaactatttgtcctatgattgctgcagtgctatattctattttcttaggaatctcttttggaatagatcctttagttaaataataaacaataatttcttcattttcaattttgttttcaccagacaaatgtaataaaactttcttttccaattcatcatattctttaactaaagaaggaatattctccatctttatatctctatgtgttgtgggtcttttagtatataaatacaaaactacctctttttccataattttcaagaactctgttaaattgtatatattacctttggaaccggacatttttttaccatcaacagtaaaaaattcgtatactaccggtattggtggctctatattgaatacttcttttgctattttaggactaattttccaagaagacacataatggtcttttcccattggttctacatctgtatcaaaataagcccaatccattgcccattccacataccaatctagtttaccatttctaatagtggtttttcctttatacccacagccttgtattgtttttttctttagatgccttgattcacatatatattctacttctttcgttttaggattatagtttataacatgtgtgctaccgattctattgcagttctcacatattacagagaatggatattctcttacatgctctttatgctctctaagaatttcatttattttatctttattttctaaagctttttttactaaattctcccataaacccgtattatataatatggaaggcgagtaatattcgaatcttatattatctattattcctagcaattcgaactctttaaagtaaatagaaataaaatgctcgctccaagaggaatggcatttgaatgggtctggtattcttgccacaggaaaaccatcatatttttgttcgtattcatgtttttctttaaaatcaacgatatttccatatttgtccgctattttcgatggaaatcctctcattggatctctatcgtcagaagtaaatactaacctaacattatatcctaaaatgtctattactttagctataaaatatgctctaatgacatcgttagcattacctatatgtaaaacccctgttggggtattagcacatctaacagtaatcaaatctttattcttcttctttgctctttctattgcttctaaagcaatttttactgcccagaaatcgctatcttttagtttttcccttatatactcttctatagttaataacttcccattataatacactttgttttgtctttctaaccccagttctttcaatttttcatcttttgctaatggcaagtacagctccactatatgagcaattccaaatttttaaattttttatattttgaaacaaaagcttttataaaatctttgggtaaatccgataaagtattcctataactgcttagacctagcttttttatggtctgttcatatttattaatatgatccttcaataaagcaatcgctgtttgttcatctattttattatcacgcaaatattggatagttatataaatataaccgaattcttttcccaaattcattagtatgtcttcgtttaggctgttgtttgcaggtatttggcctaacaatactatataggaatagaactcgctctttttatctatcgattctaaaggtttgcctttaattaatagttcttcgccttccaaataatattttaaagcatctattattctatctggaatccttgctaaattaatagtttttaataaaatatatttactagctaaatcctccaaagcatcgttttttaattttaaggacacatctaatagttctccaacaaaagagtatattagagcttcgtcatcgtcaacatcgaacattttggctatcgcatatattagtgtggcaatatagaaatcattggaaacaaccaaataatacaaaatatctttatcgccgaacaactctttagccatatctacgaatttttgtttgtgcttcctatagaattgtaaaaaatatcccatcacttctattttagtttttctttataaattttctttagctttgctttaatttgtgggaacacatagaataaataagagaaaagcccaaacaatattgctgaagcataagataatatagtggcaattatagcacctttgattgaatattttggtatcaaaatcaaatcgaagaatatattaactattagtgaaatccataaagctatagcgcttaaatgggggaatcctttatattcgaacaaaacatttatataggataggctatccaaaaacacaattggcaaagctattaaagttaaatcataaactatttcgtattgttttcccaacaataaaactataacttttttgcccagcaaaataaaagctatagcaaaaataatggctattaaagaatggtaaaatattgtttttcccaatagctttagagaatctttccagtttaaatccctaatagctggagctaaaacgtttctagcattgaatatatttaataaagcctctattgtttgtgagaccaatttgtatataccagcatctttaagagaaagcaaaaaacccacaatcatcgtatctgttatataataggtgtttttggccaaatttattaaattataactaattaaatggtatagctcactttttgttagatttttcacagtaattttcggtttaatatagataaacaatgccgatgctattagaaaatctgttattacccagtctaaaaatatgtttcgagaaaaaagagagataattaactttaaaatagcatccaatagcatagatatagaatataaatcatattggtagttggctataagattagctctcaaagtcataataaaagctaggaatatactatccaatactagcaataaatatattattggatccgaaattaaagattgtaaaaaatagtacaaacctaagaaaataggcaaaaaaattattattcctgctaaaattataccatagtatttagtatctttgtatttgattatttgttgggctgtcccaaggtttattaataaagcataagtcatagtaaggcttgtaaatattacgaacaaaccaaaactatttgaatctagccttctcgctaatattattgttattgcggaataaattaaagtgctaattaaagtgccgagcttttcgttaataagattattgagaattttcaattttatcttttatttcgtcatataatagtttagcagcattttctgctctaattaaaatttggtctataacttctttagaaggtatgcccaattctatggctaaaccaatagaacttctatgggctttaattaatagttcgtcaattatttctttagtaggtatagctaattctatagctaaacctctagcttttatataagcgtctttcaattgctctatatatagatctaatggagtattcaatatttgtttgtcatagaatacttcatctttagcggctataagagttacttgcctttctattggttttatacccaaagtttgtaaaacattggcaacttttggacttactatttccccttcttttacaactacagcgtcttctacaatctctattttaccactagtgactttggttttaactcccaatgccctaagctctgtttgtattggacccacaggtatattggttataccctttggaataactatatcttttggagcaatttcccctgcttttatcgggacattaactttatgttccatgaatatttttgctattttgaatatgttctcgtttgtgcttaataataaagctgttacctctttttctttttccaattcgttagccaaatcttcgtaaccagtctctttcaatgctctaattattaacctttttttagaaactctcatattagctaggtttctaacttcttttctaattctttgtaaatctctcgtagggatccccctaatattagcaattgctacagttttacctttttttataatatcttttaacctattaacctcttcaaccttagaaggatttaccattgaggtcttacacagaatattttaaaaattagactataattctagcaatttttgcgagatctggccacctctctgcaacttctttagctattggagtttttattattgttccttttggagttccatagtcgtcttttaataacgctacagcgttatcctcaaacttaattcttgttccatctcttctacgccactcttttttcattctaactactactgctttgaatatttgccctatcatatctggttttccatctcttacagatacaataactaaatcagcaatacctgctttagcgagtcttctttttctgcctttgtaaccttttactgcaataagctttacaacttttgctccagagttatctgccacatttaaataagcaccaacaggtaaagctcttactattgaagcacttattggtttcattcataaacgatgttatagaatttaaatatgagaaagtgggttaccctatttgctgggagtttcgctttatggttgggctattatattataataggagaacctaaagcaataaaggaaacatcgaaaccttctatcaataaaccaaaacctataatagtgaaagaaactaaaaaagaaactaaaacagaacaacccaaaaaagaagagataatcataaaagatagagatgatgcttttatatattggttgttactctctttaaatgctagcaataataaaggaaacaatagctagctctttagctgtaattgataaattggttttaccctttcctttaattttatggtatctgtctgtatttttgtttattaatttgttcttttatggtttattgatttttctttcaaagaaaaaatccatagatatagaaattaaagaatgcaattggtttttctatagtgtattctttgctattatgtctaagttgcatttgccgttatattgtataaaagttccaaaaactaaagaaatagcaagaatatatttgtttgttatatctattattggtttgttcgctgtcaacgatattctaaaagagtatataatatttttcattgttagtaggttaattccttggcaaatattacatttttacttttattctataatagagaaagatcctgaaaaaatattaaagaaaaagtttgaacctttaacggatggcgattatataatacaatatttatttgaaaaagacatctatctccctattggtttgataataatagaatttttcttagacttgccatataaaattgctatcccttccctaatactaatattttggtctctctatgataaaatccttaaattttttatataatttgtactcccaactcttcttgtgcccatttaataatttcttctttatttaacctatgcctactaccaactttgcttctttttattcttctcctttcaactctatagccaggcctttctaatgttacatatgcttctaatcctattaaacctaactctggatcatatttcattcctggaatcattatatattcggggataccaaaaccaaaccccctatctgtaaaagaagaagcttttattttgaaatctactgcgggtaatagtttttcttttaatattttgtaagctttttcccctcttaatgttacttttacacctatgggcaaaccaggtctaatatgccattgttctaccctaacttttgcttttgtttttactggtttttggcctgtaagtctttttaacaattcataagctttatctaatttttccccactttctccaaccccaatgttaagagtaactttttcaatcctaatttttctcatagggtgttccatagcaatagcgaagaaagttatttaaaaataaatggtttctctaaaaatggagatttataactatggaactcaagataacgctttagttatagaaatgaaaagaggagaatcgattaatctaaaaaaggggtcacttatttttattaaaggtaaacatgcaataaaaccatcaaaagagaatagtttctttttattagaatgcctcgggcattgttctgtaggtgtttcgatgggtattggtaaaaaagaaataataaatgttattgagcctttatatataaatatgaataatgtaattggcttttacaatgctaaatatgtaaaactgggcaaaaaaataatagattataatacttctatggatctaatttatacaagggaaggtaattacattttgtcttacaaaggggataaactagaacttagaataggaaatgaaaaagttttagtagatttggacaatttggttctaactaatggcaaaataaaatttatccctcataaaaatgctgtaataacaggggaagaaccattgttagcagaaatcgaaggcccagcaataatatatttgcaaaccatcactttataaaaaacatttcgtttactccatatgggtaaaataataagcgctatacaaattgcttacgaaggaggaatagatttagatactttgaaaagaatgcttaaatcatataaacccaaaggaaatgttattcccgatgttgttactaagcattatagagatttggaatttggccaactaaaaggggttagaatagtaagaatcgcaacccatccagattttcaaggaaaaggatttggttcaatagcattaaaagaaatgtctcaagatctaaaaaataaaggatttcattggattggtactggttttggagcaacagttaaactattaaatttttggctaaaaaatggttttattccagtccatataagtccggaaaaaaaccccgctactggagaatactcggttgtagttataaaaccattgtctaaaaaaacagaagaaataataaaaagggttaattttgaatttaaatggaaatttttaaattctgttacagatgtttttttcgatatagagcccaaattgggagtaatgttaacttatagcccatataagcatagcttagagaagcatggcattaaaatatttacagatgttcaattggatagaataaagctttatattaatggacctatgacatatgaagctgcggcagatctagttaggcttttagctattaaacattttgttgagagaaaaatcgaactaccaatagaaaaagaagaaaagttgtttgccaaatctttattggcatggagctggaaaaagatgtcggaatattatgacaaaaagccttcaaagcttagagacgaaataagaaagatatgcaaagaattataccgttcctatttctaatattagtattagtatttctatctctaataccaaagagttgtaaagtagaatatgttattgatggagatacaataaaaacgagttgtggtaaagtaaggctttctttaattgatgcccacgaaagaggagaaccgctatatgaaaaagcgaaagagtttgttcaacaatttcttagaaattgtgaccccgttataataaaagaaggctatgataaatataatagaattttagcgttagttaaatgtaacaacaaaacattgaatgttgagttagtaaaaaacaaactggctattgtttatttaaggtattgtccttattccaaatttagagattatgatatattttataatttttgccattatattaaatcaaacaaatatggttgtttagaactaaaaaggaaagggcaaaaagttattatttttaacaaatgcgataaaatccatatcgatgggtttgttactacatataatggagagtttattcctattaatgttactattgaaaaacaatatactatcgatttttatgcctattttcacaaaaatgttttagacccgaaagagaaaatttttgtattcgataggaatggctttttgttagctcagcttggctcttcttaatcactgctcatcctgggacagcctcatcatttttgctttagtttttctaaaactttttcgaaatgtgggagcttatcaaaggcatattcaactaagctatctaaagctttagctaaaaattcagaattaatccatataccgacatcgttttggtcataagcattttggtcatcgtttagcataaataatacttcttttccatcaactattatcattctactatttattttatcgctatccctaatttctacataaggagcaatttttttcaaatattctacatttctctctgttatttttgttgccatttttatgtttactcccctattgtataattgtttaaatagctcttcaaatgctcttactttcctaatagctccagtttcggtagtgaatattataactttttcctctgctcccctcagcatagcctccatttgggaatatacactatatctccccctaatggaagcagcattgtcagttatatctaaattctttagcccttgtttatataataattctagttgtgcagctaaatcgctttgtgctatcaaatctaattttttagctttttcttgtgcttcctgtaatagcctttgttttaccctattaaatacttctctaggggggatagcagcatatttaataggttttcctaatctcataacgacaaaaccttttttctctaagctttctaaaatatcataagccctacttcttgggacattagccatatctgatagttctccagcggtagcttcccctttagccaatagagccaaccaaattcttgcttcatatagatttagaccaaatatttgtcttactgtatttactaaatcctcatttatcattagcttatagatagacctgatttaaaaattttttgtttacctatcgtggtaaagtagttaaacatcccatttataaataaaaaaactattatcgatatgtgcgcagggcactagagttgccaataaacattataataatattagtaatagtgtttttcgtatttactattgttgtagggtttgtacctaagctattagggggaaccctaggcaaattaggaagaattagcgcttatacccaagctaatagtgttaccgctgcccaatccacatgccaaacatggtgtgaaactgcaaaacaagcgagttctccccaacaatttttaacttctacttattgtactaaaaaaatcgctatccctgcgtcgaatggttgttggccctccccagttaatgctgggggtagaggggaatggttacacccctgtgggggctctactgttagcgaaacccaatgtggagcaagaataacaaattttgatgaaaactataaaggaaataataatatgaaatcttacgaccctggctgtgtttctgctgacgatttgtataaggaatgtacaacagataatgatttatgtgtttttgtaccagcagggttaaaagttaatattccaaccaattgttggggaacccccatagaaacaccttgcgataccgttatatttgttggagataaaacctacgattgtggggtaagaaggttttatgttaaagtagataaaggaaaagttacattattccatagtaataatggtggaacagaagtagaaatgtgtgcttgtagggatatgtccagaacagataaggaagtttatttgatatattttgatggcaaagtattaacatgcactataggagagcaatgtcaataacctttaaaaatagtaaacataaaagaaatatgcgaagatctatagaattaccaatatctgtagtgctcttcgcaataataggtttaatggttttttctatattattgggattcattcccaaggttttaggctctttgttaggaggttttatgtcctctgtttccgctactaaagcgcaatcgatagaggaagcaagagctatttgccagcaatggtgttctttagctaaaacttctagcacaccagagaaattccttaatagtgatttttgtacaaaatatgttgctatcccttcccaaactagaaacgcttgtggagtaaaaaatacaaaacccaacctatatgtatgtaacggcatatacaaatacgacagtgggaatagccaatgggtgctccttacgggatgtgaaaaatatgaaactggctcccaatataatttaagcagtgatgctaattgcaaaatcacgaattttaatgtagattgcagaagaaacggttttgttctaaaatgcaatgttgaattgaaaacagaaggctcttgcacagtagatagtgttaaattattttatggaatcgccaatggtttcgttgttgctttagctggcgaagacgaaagtagtgtaacaataaaaaatggcggaagctacaccataagccaatctaaatctctatcattaaattccggttcttacaaaggagaaatagagatagaagatccttgttatactaaataccattacgataaagcgagatgtgaaagcgatagtgcttgctcttggttaaaaactggtaaaagcattgaactaaaaaaatgttacgaaaacccaataggagtggtatgctctttgcccccattattagttggaacagttcaatatagctgtgcaagtgatgaaaaaggttgtttctgtatagggagcgatggttctattctaagaaagtgagcaaacttttagtttatatatttatgtttttgcttataacacttttgttagtattgtttacaaaccatttgatgaacgcttttaaaataggccaatagacaaagcgatgggtgagatagcaattagacttttagttacaggaggtaaagcgacccctggcccaccaatagggcctgcacttagcccattcaaaataaaccctggtaaggttgtcgcagaaataaacaaactcactaaagaatatgaaggtttgcctgtacctgtagaaataataataaatccagaaaccaaggaatataaaatcatcgttggtttgcctccaacttcagcattattaatgaaagctgctggagtaacaaggggcccacaaagaacagttcacgaatgggttggtaatgtatctatgaaagatgttgtggaaatagctaaaaagaaaatagattctatgccaactagttctttaaaagcagcagtcaaatctgtattaggtacagcgagggccactggtataaaagttgagaacaaagacccaaaagaagtaactaaagaggttgacgaaggaaaatgggaccatattataaatgaatagaattatatcaattaatggaccattagttatagccaaagggaaattctctatatttgaagtagttagggttggagaagaaaaactaattggggaagtaattggtatagagaatgacaaagcttatatacaagtttacgaagacactaatggcttaaaagttggtgagcctgtatttaatacagggaaaccattaactatagagcttggtccaggtttgttagccaatatttttgatgggttgggacgaccactaaaagatatctatgaaaaaacccaatccatatatattccaaaaggaattgatttaccaaccctagatagaaaaaaagtatgggaatttattccaaaaaagaaaaagggcgatacaataaagggaggcgatataattgggactgtaaatgaaaatggatttgaacatagaattattgtcccaccaaatgttgaaggcaaaatagaagagatatatgagggcaattttaccatagaggaaactattgctatagtaaatgggaaaccaataaaattatatcatgaatggcctattaggaaacctcgtccttataaagagaaattagattataattatccatttattactggtactagagttttagatataatgtttcctatagccaaaggaggtagtgctgctgttcctggcccatttggttcgggcaaaacagttctaaaccaacaaatagcaaaatgggccgatagcgatatagttatatacatcggttgtggagaaagaggtaatgaaatgaccgaagttttagaagaatttccaaaattaaaagatcccaaaacaggtaaacctttaatgtatagaactattttgatagccaatacctctaatatgcctatagccgctagggaagcatctatatatttgggcgccacaattggagaatactttagagaccaaggttatagtgttgttgttaatgctgattccacttctagatgggccgaagcgttaagagaaatctcttctaggcttggagaaatcccaagcgaagaaggatacccggcatatttgttaagaaaattggccgaattctatgaaagatctggaagagtaagaacattaaacgatttagaaggctctttaacaataattggagcagtttctccccctggaggagatttcagcgaaccagtaactcaaaataccttaagattagtaggagcactatgggccttagattctaaattagcttacaaaaggcattaccccgcaataaactatttaatatcttatacaaaacaatgggagtttgttaaaaaatatttcgaagagctttatgaagatgtgatagagattagagaagaattctttgccatactaaaaagggaatctgaattaatggatatagtttcaatagttggacctgatgctttgtccgacaatgaaaaaatctatttacatatgggaagaataataagagagggctttttacaacaagatgcattcgatgaaaacgattcttattcgcctttagaaaaaaccatcgagttaatgagaataatccataaatattatgttacagtaaagcaattattaggtaaaatcccattagaagaaatagaacagaaaggaatacacgaaaaaataataaaactaaggtataaaagtttaaaggaattcagagaagaaataaaagctattgaacaagagattttatctcttctaaattctcaataggtattttctttctttcccttgttagcctatcttgaaatgttactaaattattggctaaatcctttttaccaacaataactaaatacctaatgtctttctctataacatattccatttgtttcttaaagtcccttctaagcaaatcaatataaacatttaatcccaaatctcttaatttattggcaattctccatgcttctttgaaaacctctatataaataactgcgatttgcgtatatgtctttttgtttagattaaatatacctttttctaaaccaacatcgattaatgggttaatacctatactccctccaacggcaggaattttttctttagaaaatatccctattagattatcgtacctaccacctccgcccagggctctattaaaaccttcaatccacacttcataaaccataccagtataataatcaaaacccctggctaattttatatcaatttttattttatttttcttttccactaaatcaataatttcccaaaactcctttggataaaattcttcaggattctcttttagcaattctattatcttttcagctttatccgttatttgctttagtttttctaataccccttcttctcctattttgtcccacttatctataattctagctatttcaataaatttatccttttctcctactttttctattagtgattctaatgcccttctatcagaaactcttagataaacattaaatcctaaagtttcataagcctctatcatcatatttaatatctctgcatccgcttcaggataaggagaaccaactatatcggcatcggcttgccaaaactctctatatcttcctttttgtggttcatcgtatctaaaggttctatctatcgtatatctcttaaaaggcaatttaggcctaaaccttgcgaaatacctagccaatggcacagtttggtcatattttaatgcataccattttttgctttgtggtaccctaaaccgccatatctcttttttctctgcttcttccccatatttgccttttaatgtgtcccaatattctacaattggagtaataattggatcaaacccgtatttttggtaaacgctttctatttttgatactatttctttccataatatggccaattctggagtaaaatcctttgtccctctcggaggtaaaatcatattcttattttgttaggtaactcttcaaaaacttgtttagggtctttatctatctctactcttgggacaggtaaaaattttttgtaattacctgctgctattactaaggatttgttcctttttggaaacacccctattattgttttaccagtttctttatggattatttctattgctctttctaaaccaatgttgtgctctttaaataaagcaaatatagtattatgtttttctattctctctattttgccttcgaaaaactcttttagaatagaggaaaccttttccaaataattattcaaatattgggtagctatgtctaaggatctttgccttttcattaacaaaccaaaagcataatggtattcctttttttctattaaagcatctaaggccaaatctaataaaatcaaatcatcaaaaaggttttcccccaacaaataatggtccattaacacgttttctgcatcttttattaattctagatccatccttcttagaattatgtttgttactagtttatccttatctttgtcgcttagatcactaaattttatccatgctttttgaggatctaaattagactctcttaaaaatttctttacccctctactatctgcagtaacccctgggatataaataaaaaagctttgttctagcgattttattaaaggcctagtaaatataccagggatagccaatccctttttgggctctaccccttgtttagtaagcaaaaatattagatcttttcttttatttaaagcatatttattatgaaattccaaagcttgttttatactgaatttcctaccgtttaccataaactcatcggaaaacgatatttttacatagaattttctttcatataaagggtaaactaataatgctaaagcaataaggttttcctttgtgggttttacttttatatcggctttttttgtctcttctatttcggaaaaaagattatctatcactgcttgttagatttgaattcgttatatatttcttcgaaaggcttttccccatattttactataactgtgtttacttgtacaatctcatcgcttatcgtattgccgtatactgtttttttaaccctcattcttttgtccacccaccaccaaatttttttccttactgcgccttcaacttcttttctcataggaaatccagcgatatcgctacccccagttatttttaattcatatccatctaaacctattttagaaccatcaattgtatcgccaatttttttgccatatagccattggggttctttagtttctatttgtattgctttcccacttttaggatcacttactactattttaactacagatgcttttggcatttgctttcaattaatatacctttaaagaggtacttatagagaaaacaatgataccttatattctatatatagttcctatattgctagggatagtcttttctttatatgaagtactgccattaattagttccccttactcggaccctttgtttatacagtttgttcttccagcactagaataagtgggagcttagctgatttattaagtgttggagagaaaaaaataggttttacttttaacccttcagaatattgcttccaaaaagtatacttaattccagaatttgatttggaaacaaagagagcatgtgatttaataaaaaaatacgattctcgtttatacaattatttcgaatcagaatacggcccttgtagtaataaaaaagaatgggccgaactatatgttagtttagtattggcccaactatcagctttgtgctacaaatattactatggaacccatcctgaagataaattccattacaatgttttcccatgcttttatgtttatatcgatggcaaatataatgtaaaagaatacgaaataacactattacaaattttgaaaggctattattttaattatatagtaaaatcagaaggagatcttgctagtagtttatacaaattcgtatctaaatttgtaaacataaaaaaaattgacaataaaatattgattaataacaaattcgagaaaaaggatattgtttattatgatgctagcaatgataaggacgaaataaatattaacaacaatggaatcttaatagcatatgttgatgggcttgaaagttattccataagcgaaaccccctcgatattaatgggtttaactggatctatcattatagaagctgctatagattctatcacttttaagggtagttctatatttaaagctgcatacaaaagattgaaagaccttggagaagaagaggctaagagggttataaaaatgtttttcaaatctttaaataaagtaacaaaagagttgagaactaaatatatatactctattttagattctattatggatacggaaacctatagaggttatttgaaaaagataagagaaaaagctttagaatttaatcccatgggtacagtaattgttgcaagtttgcctaatataaatatagatatgtctcaaattttatccaactatataagcgaatctaaagatgtaacaaaaaatactattactttagaattgaaaccaggtattaatctaaggctttgctattgtaatcaaaatggttgtttagtaggtaattccgaatcgctaaaatttaaatgcgaaggagaaatgatatatggtttatgcgatagcgaaccaggggaatatattgttgcaccaattatatattacaaaaaaataaactgcgatgagggtaaaagttaaagatgataaagtacaactatatatagaggattacgaggatctagttgatttgtttttgacaatagaaaaaggcgatattatttgtgctaaagtccctatagttataaaaaaagagtatgaaaaagagaaaaccgttaaatatgtctgtatagaggttgaagagttaaaattagatccttattatggattaaggatttatggtagaatagttaaaggcgacaaagatgttcctttaactaaaatgtccataaatttaaatgttggtaaaactatagaaacccaatataatgaaaaatggttaaaatttaaaccaaaaaatgttgtatatgttttgtgtgttgacgatgaaaagggagtattagcggaaatatatagaaacaaatataaaataataaaagagtattatagagaaggcgaattaagtgattttatagatcaaatactaaaagacataaaagagaacacaatagtatgcgggccaaactttattagagatattatctcttcgaaagcgaatgtgccatcaatctatgcttcctatgggggagaagaaggaattagagaactattgaaaaacaaggaattctttaatttgataaaagatgaaatagagaaacaaaaaatagagaaattggaaaaagcgttccagctattatataaagggcaaatctctattggagaagaagccatagaggacataaaaattgggaatgtagaagaggtttatgtccatagggattatttaaaaaggcttaaagagagaaaagaagaagatctattaaatacaatcctggttttgcccaaaaaatataacgccaaaatctatataatagagggcgatagtgatttggcaaaacaattgtattttctaaaagtcattgtgaagaaaagatggttttaattatataatagggagcgttagttcttataccattttcgctaaaatgtgttctctctactttataacccaattcctttagtttttccattattttatccataggaggaatgttagtttttaaggccttagctatagatggcaattcataataatagggtttatctatttcggattcttcgttaattctttctattattttgtttgattgcttattgaaataatcccttttatctaattttattgcccatagctttcccaaatataagggacctattctaaacatttttcttttacaatagggacatacgctttcgctttccgatatataatagcatttagggcaataatataaataacctatttgagatttcagtttttctattctatttgatccttttcttttaagcatgtataccctataataatggtaagcgctatgcgcataaattggaattaaagctctctcgatttcggcgcctttgtttattagatgggccaccaaccctcttactccaatttcgtgtttgattggggtttttattacattaaaattgtatcttatgtaggctttcctatgcttttccccggtccaaactgctgtgtctgtataggttatagccaaatatttagaagtattgtttattaaatacaaataaggagttgcagagccgaatggatctatatctatatattcatatttttgctctatcgctctagcatctaaattagaaataattatctttccttcttttatattgtttaattccaaattcttttttatatattcgatagcgattggatttatatcattaaaatgcacttcccttatatttgattctaaatagtatctaatccccctaataccgctagcgctcattgggtctaaaacattttttatccctaatttgctagctacttctaccgctatatctcttcctatagaagacaatggattataaaatacgggcatctctttcgatatattattataatcgggaatctctatttttgctagcccttcttttataatcatatgctaaaacttgtaagtgcaataattaaatgtgttttgtctttggtataattataatattccaaattcgtatatccccataaagagaaatgcttttgatagtatggtaatactgataacaattttttatctgaaacattataggttagtaaaacagttgcatataccttaaacaaagttttctccacatcataataacaggttagcttattgatttttgtctcaaaaggatagtatatataataagtggaaagatccatgtttggacaataattctttataccagtagtattgccaacaaattttaaccaaccttttactgtttgtaaacgccaataggaataactggtattatttatgttttgctctgcatcttttaatctatctaaagccattcctaatgcttcagcatcatatattgttaataccttattcttgattttttctatttttttctttatttctcttatttcttcagcaatttccaattttgtatggtttttatcgtatttgtaattagctataaagcaaaaagatgccgcgctatagtaatggcctttcttaattgcttctaaagctttttggaattcctttgaatttggtgctatgctttcagttttattacaaagttctaaagttatttctctcataattttgttataccattcggggattttcagtttatgctttttcgccaaatctctttttgttataaatttatacacttcgaaaacattgttaaaatataagcctttcttaaagttctcgtttccatgaataagggttttattattttttaatactgcttcatattttttatcaataccagaaactgctccaataataccaaaaggcaatattactccggtaaaaacataatttcttacatcgaaatgcggagcagttatcaataatagtttgcctatagttaaagctaaccctgcagagctaccagaagaataatagctattgctttcaaaactaattttgtattggtatatattttctattcctatacttttaataaattcatcggacatttttatcgaatattggaaattgttatctatataggagtttaagttaacataattgccttgtccaatagttgcttctatttttattggtactatttctgcactattgtttgttattgccacagcatttatttctatatacctatgggtttggaatagtataaaagacattagcaataaactagagatagaggcataaattagaatatcttttgaattcataattttttatacaaatcgaaagctagatctattaactcttctatctcattttcatcgaagctaccatagtctttttgtatgctaacaatgttttccccatctattgcgatactaattttggcattgctaatttgttcttcttcttttgttgggtctacaaatattatgtttttgtatttgtaaaagcttatatataggggttttctctctaataggttagctttttccaatagttttactactgctaacattgatgcgtctaaaatattgccatcgtcttctaaaacgataacatcaatatagaaagattttactttgttttcatcaataacatgtttttctaaggctatagcattagagcttcttaatgccctatctattaatcgagccaatattaaatcttgttctgtcggagggccttggaaatattctttccccgcaataggagagaaatcagcattaactattagattggctttacccttttccataggctcttcttcactaatagataggcctgcaataacttgggtattgcctaaagaaagccataccctattttggtcttcttttatttttatgggcctatattctaataaaggtctattatctatatggaaaccatccattagtttttgctctatataatgcattcatctctaaaactaaataatttaaattattttgtgtatattattactctatcgtaatgctctaatctatggtctaacccaactctttggccttggtgtttgacgcttttgccccaaaccctcgcaaatctaaagttttttagcatatctttatgtattcgttcgactaaatcttttactgtagagcctttatctaatactaaaccattctctgtatctttagtgaaaaccaaaattttgttagcccttttaattatttcttccccgatattatctattttctctttagttaaatctatataaggtttatgagatgaaccttccaaataatcaattaaatctgagatagttgcttctttgtatgctattacagttgcattgtatatcccatagttttttagaatttcacttactatttcttttgtagcttttaatggacccataatttttattcctcctgtgggttcttttattattttgattttgttttctttttctcctaattttatgcccatcttttctaaaaaccgctttccttcttcgtcaaacaatataataagatcagcatttttcaacaaatagctatactctttaggaaaatggcttggatattctattagttggatttttgcacctttgtaattgtatataacgctaattggttggactgtttcatatggcaattctgttgaaggaaaatcagtattaactaattggtttataaaatatgttttcccactattgggccccccaactaatacaaccattatgtcaccttctttggagatacctttctttgataattttttagcttcctctttctttttttcaatctcttgcctagttttggatatctcttttttaagtaaagctaatagcttttctgtacctttgtgttttggacatagatatagagcttcgtatagatattttagcctttcctctaaagttttggcagctttagctttttcccaagcttttataaattctggtgttagattagctggcatttagcttttcttccaaatgtttaattatttcgtcccttttcatataaccgggaaagcttattcttatatataatacatctcctccttctgtggggattagtttgtcttttcttaagaaatagtctttatcaaaccttaaatacaatacattattctcccatctaagttttatgtagtctaaaaattcttttttatcctcaatccttttaattatttcttccaaaattttctttattactttgtttttgctagttttgatttctaaagtatataatttatctgataccaacccagtgctagatcttatctctattaaaggtttatcctttttgtctaattcttttatgaatcgatttagtgattcttttaattcttccaaatcatcccagtcatagcctataattcttattattatgttttcatatttcattatagggctttattgtattagtttaagggctttctgccagtccttcctatcgacaaaataataatagccatacaattggttatcgatgtattctaaatattttgccacttgcgatacttctgttatcggttttatttcattatcatatatttttatgtcctctattttgtttttagagactattctaattttataataattgatattgcttttttccaattgctcttccaaatcttcgttttcttcattgtatttagcgagaagcttaggtaaatccctattttctattctttcccattcccctattttataatatttaaacaatccaactaattcataatcgttcattaatgctatttccattggcttataataatccaacaattttgttattgctctctctaataaaacatcaccagctaaactagatttatggaaataaactgtttttcttaaatggctccttaatattaaaatttgttctatcaaagataaggctttctctctaaaagcataggtattatcgattttaacgatattttttataacataatgataatttatatttggattgccatttgcagaataataggaatctctttgcaaatagtctaacctatctgtgcctaagctaaaagtaactatgttttctccaataatccctttgtatatctcatttatagtgtaacctaaactttctatttcttctttcaatgtttctaaccaatagtatgataattcctcatgatttttgtttagatatttttgcaatgccatttcccctgtatgggagaatgggcaatgccctatatcatgcaataaaccaactaaagaatagtatgttgtatccaaatctaattggtttgctaatagttttgttaaatagtatactcctaaagaatgttcaaatctcgtatggttcatagatggataagccaaataagtcaaagcagtttgttttatatatctaagcctttggaatgctttgctatctattataggttttagtttgtcatcaacttctataattctatatataggatctgcgattatcataattcccattcccacatttgtttagctaacttcccatcgtagaaatatttatttatatctacttttttagctttctcttgtaaatcttttaagaaacgccatatcttttcgatagcgtattgctttagttccccagtagttagtgtgccttctctataggattgttccaactctttcaatttttttgtatcttcctcaaacaatgctttcaaccaaaagaacacaacatctatatctgggtttcctccatattttctatgtaattccaaagtaggttgccctccagaaaaggctttcattatttttctttttacttcttcatagctatcatctaaaaatattgccgaatctggatcggaagaggacattttagtatatggcccccttaatccccaaatcattttgcttaatatttctgcagctttgtatttatttagttttggagctatgtctctttgaagtctaaaatatgggtcttggtctatacctgcaggtattaggggccttttgttttcgaaaaatgttggtactatttgtaatactgtataaaatactaaacccacagaagtgctatcattaaacccaaatactgctctcgcttgtgataaattaatgtgcctcgcaattggtatcgctgcagagtataaatgttttatatattcagaattaatgaacataaaagttttgtctgggtcgaagcccaatgccgcaatatattttgcatgcatttcttttatttttcttctaacctctttataatcatcaacttttttagcccaatatttttcttcgtctggaaacattatatatacattaacatcaaatttctcttggaaccacctagttaatataaaaggaactaaatgtcctatatgcattttccctttgcttggagctatgcctgtatataaaaagaagcctcttccttcttcgtagtcctttaataccaaatctaaatctctatgggcataaaatatgtttctctcaatcaatgggtgcaattcctttgtatattcttttagtttttcctttaatttttcatcgataggttttaccccaaaaatttctattaatctttggtagtcgctttcatcttttatttgaacctcccagggagtaacttttgccattcaaaaaagataaaaaattttataaaaaatgtttttgttccccaaaatgaaatgtgattcctattgcgcattttggattatttttatagttagcataatagtatggaatttggcccctttttataaagggttgttaacatttatatcaataattgttaccctcttgttgataataagattattctattggaaaaaagtgaaacaaataataaagctatatcaaatgcaggccaaactatctaaagctttgaaagaaggcaaaataaatatggaagatctcgctaaggaattggatttatctataatggatgagcttttaaaagatctcatgaggaagaaaaaatgaattatgagtatgttgctaacaaaatcaaagaattggaaagcccagtattggttataactgataccgaccccgatggaaagagcagtgctttgctgatgaaagctatattagataggctaaacaagcaatacaaaatatatcctaggcctttcgggaaaaaagaaaagcaatatggttatataatgaatttgatacaaaaagaaaagcccaattctattattatgttagattacccaatcgatgatagcactttaaacaaaataggggaaagttttagcaaacctataatatatatagaccaccacaaaagaagtgttcctcaattaaaagataacatagtttattttgacataagagctctaaaattggaaatcacttctacttctggggctgtatatagaatagggaaagccctatttaacgatttcggattatatagtaatatagctgcgattggagcgataggcgattttatgtttgacccaataattaaagaagacctagaaaaatactatccctctttgtatcaaaagggttctattactcccatattcatttatttgtttgatttaatatcctattcgccttttgaagatttaatgaatttcccatttcccaaaaatgtaaaagcaatgggcaaaacctttttctataggtataaaaatttggctgatgccgttaaatactatgaaagcgattgtgttttagtttataaagtgaaaagctctactagttttgtttccacttatttaagtggtctatacccagataaaattattgtagtgtttactaaagtggtaactggtttattagataggttgcctttcgttaatagatattatagagcaagcatcagaaaccaatctagaaatttagatgtaggaaaaatagtaatgcaatataaaaacaaaatccaaggtgggggccacccaagggcagcagcaattatgttggaatcaaaatatttagaccatttcatttcttatctagagtcgaaatgtaatcaataatttggttaactatagtatcaacatctttattggtaacatctatttttatgtatttttttccaaccaattcgctttctattataccagcggtttgggcccagatattttcgaaaattttgctaaagctatagcccctctcttttaacctttgttctattattttcggatctgctattaggtatactactaaatccacatctaatagatgggacaaatgggaatcgattacactattgtcaggaatttctatatttaacatatcgtcttctattatatagctatcataaaaccaatcatattttggtttgtatttttctattattagcttatttaagtcaatgtattgatagcctaactttttagctaatgctttagctattgttgtttttcctactcctggtatgccagtaatagcaattttcatctttttaagaaagacaataatttatcaatgaatgattcgctataaacgaatttctcatttgttaacctttcagctattcgttttatggcaatagccccttttgtttttttattttcgatagtttgatttttcattgtatatctttttatggttggatcgtaagggattattcctaaaatgcttgtctctaggaaatcttctattgttgaagggttaacagagccatcatacatattaattattgcccctttaatagagatacctttttgttctgctaaagccatggcctttgttgtatcaaccaaagaagaggcatctgtagtagtaatagcaatcgcttcgtctgctcctaaaatgctataacgcatttctcttcctaaaccaggggcagtatcaattattatataatcgtaatgctcttttaggctttcaattacatcttttattttttctgggtttatgccttgcaaatcctttaatctaatgctagcgggcaaaacatatagattgtctttttttactatagcttcgcttacatttatgtctcctcttaatacatcattcaatgtatataatgggtttaatcctaaaaatatagcaacatttggagtagtaaggtttccatctattaataaagttctaaactttgtggaaaggacttttgctaagttaacagatattgtcgttttaccaaccccacctttgccagataatatagctatcgctggcattgggttttttatataaaatttattcttaaatatcctatttctattgactagtagttaaacctagcttgtttgccaaatagctaatataattatacaggttttcttccattgtagattcgaaatagcttaaagcgtataatatattggcagaacagctagttaaacatcttatttttaatgaatatattttataagagttaacgaaagcacctaaaactattttattaggtttgcaatacaaagaccactctttaaacactgttaaattgtaaaaattatcgttattgctgttttctatagccccagtatttaattggcaccccttcataaatagggttacattgtataccttatcttgaggcattgtaatttttattatattgtttttctcctctatagggatttcgctaattattccagttctttttccatatatatagaagggcgaatagtatactatataaaaatctgctgtagtgttaccagcaagtttacttttatctatttcataataaaatgcctctgttttatctgggaatactgttttaggttggggagtataagagatttgaggactaactattgtaaagtttatgggcaatctccccctattggttactaaaaacgttagttttattttattgtcctttattgggatttcactatactttggaacagttatatataaaaatttgctaaaagtgggttttggttctatttttttaggttttgtttgctgtaattgtatacaaccggagagcataaataatataattagtaggggccacactgtagtataaacaatcattatttaaatacttgggagtgagaacaaaacccatttaaatgttggtaaaaaaataaaataatgttattcgagaaaaataaaaataaagatgatttggcattcaaatttttagaggctattaaagaggaagcggaagaaatcccaaaagaagagccaaaacaagaggttaaagagagtgtaaaagagaacaatattgaacaaatagagaagccttctttatttatacacattgatgattatgaagagttgaacaatttattaacagagatgcaaaaatatttagaagaattaaaaaaattgttaaatagctataaccaattacatgaggaagaaaccaaattgttagaggaatggggaaacaaaatagatgatagcaaagagagaatagcaaagatattggagattttgcaagtgaaagctttttaaaataggaattcactatgcccggcgcccgtagtctaggggaaggacgccggcctgccaagccggaggtcccgggttcgaatcccggcgggcgcattcctatctatattggtatccctaatgcaacattagttaaaggtttagcattagaactaaaaaagaacgaattggaattaacattaatttggacccaattaaaagagattagagagaaaaaatttataatagttcaaaacatgaaagagaaggcaaagcaaatacaatctatattaaaggttataaaagagaagttgcctgcagtagataaaaaagagatagaaaagctatttgttaaaaaaacagagaaacaaaaagaagcaaaacccgaagtaaagaaggaaaaagaagaaaaaccaaaagaagagaaaaaagagaagccaaaaaagcagagcaaaaagaaaaccaaaaccgataatataaatgatttaaaaaaacaaatagaagagatagaaaaaatgttagaagaattaaaactctaaatttactattagtccatctctagctgcaatagttcttacattggttcttttttcaattatttctgccatttttgctggcccctcttttattattcttttaccgaaatgtgttagtattaacattttcggttttgccaattttgctaacctaatagcatcgtctaagcttaaatgtttattgctagtaaaaccaaaaggatacaaggtattagctattaaaacatctacattttcgaaaaacttggccaattccggaaaataccttgtatctgcagtataacctattgttttatcatttacttctattttcattcctaatgtatatggatctgtatgttttgttcttattgattttacttttagattttcgtcttcgtattctcttagaacttcgtaatggtctaaatagtttaaataattgcgcctaactattgggtagccaaattctggggtttcttttaaaacgctttcacttgctaataaaatacctctcttttttataccccccaaggttatagcatctattactgcattaacatcattggcatggtctaaatggacatggctaaccaatatatatctaacctttcttatatcgatgttatacatttttgccctaactaatgcgccctctcctgggtctacatgtatataagtttttccattatctattataaaaccgcctgtccctctaatttgggtagcaaaaacatttctacctccaccgctacctaggaatattatacgcattaggcactataactctattatttaagaaatctttgaaagaataattttttgtctttttccccaatttcgaattggccgaaaggccaagcataatctaatatgtcatttatttggcttttatcgagctttttcaattgttctattgcatatcttaaatcgcttcttaattcggttaattcgccctggtatagaatacctactctcttcgttattggttcgtgttcttttaatttttcatacaagttttctaaaacatatttagtagcaaaataaatagaagggtgtgcgtgggcctttattataacataatcccatagcctattttgcctaatcaaatctcttataaaatttatttcgtttctaagaactaataaattatgtttcgctattatgtaagttttattttccatccctttaagttcgctcgctttgtaatctagtatataactatctgttaaatcttccaatctaaatgttctgaaaggagttaaaattctctcctctttcgcgaataaagagtaggaagcagaatcaaatagatctgcgcccaaagcaacaaacaaaggcataattaatggatggcccaacccaaataaatggactggtctatcccttggtatatctaataataagggccctattatttttgctaagctttctattttatattggttcatatatgggactattccccctatagcatatatgtcaatatctaatttggaaacttcttccaaagctttgtatcttagatctaaatatttgtctccctgtattggtccattgattgcaaaatttgccatctctatggcttgttttagcctttctaatgttatttctaaatcttttttagcttcttcgtatgttttaccataggagggaatatccaaaatattacctatatctaccccaatctcgttttggaaataaataatatcttcattttctatatctatatcgccatattgcaataattggtatgctcctgaatcggtttcaataataccatcgaagcccaaaaaattatgaatacctttttccattacttcttcttttcttttaaacaaaatatatgcattagtaattatagcgttgaaacccatttttttgatctcttttatgggcaattcttgtttaaatgggttaataactgggaatagatatggagtttcaatagttttcccatttagttttatttttccaactttgccagcagcatctttatattttatttcaaactttattttcatatacaagaacaaaaaaacaatttataaaatcagcccctgcaagttcttcactaatctgttccgccatctctcatcattcagagctataaaatattgatagaaaaatgcatatgcctaagaatataaaggttaaaccccacaaacttgaaggtgtatatataggaaataacaagtttttgttaacgaaaaacttagtaaaaggtcaaaaggtttatactgaaagaatattcaaatctaaaggggaagaatatagagaatggattccatttagatctaaattagcatcagcaataaagaaagggctaaaaacttggcctttcaaaaaaggaactatcgtattatatttaggaatagcctccggtactacagcttctcatataagcgatataattggggaagaaggaataatatttggggtagaatttgctcctagagttttaagagaactaatgtttgtagctaaaaaaagaaaaaacatagtaccaatattggcggatgcgaaccaaccagaaacttaccaacatatagtagtgcaaagcgatgttatctatcaagatgttgctcaaccccaccaagttgagatatttttgaaaaatttaagatttttcgctaagccaaacgcaattggatttttggcggtaaaagctagatcaatagatgtaaccaaagatccaaaggttatatttagagaggtcgaaagaaaattaagagaggcgaaattacaattattagaatcaataaggttagacccatatcataaagaccatatgatgtttgttgtaaaagttccaaaagcatggtaggcgaattatatcgatttattacagattttggtgtaatagagggctacataataaaagaagagcccaattattatttaataaagttaaaaaacggttataatattggaataaaaaaatcccaaataaaagagatggaaaatttgaatgaaaaaataaaagttgggcaattcccaaaaagaaaacccaaaggaataggaaatcttggtttcatttatactggaggtactataggaagtaaagtcgactatttaactgggggggtatcagctataatggatatagaggaactattagctatagctgatttgccttacgatataaaaataattgattccccttttgtaaagttttccgaagacctaaatccaaaggattgggtagaaattgtaaaatctatagaaagaacatacaaaaaaggggctgaaggtattatagttgcgcatggcacagatacaatgcatttttcttctgcttatgcttattatgctttagaaaacccaatccctatagcttttaccggggcacagagaagcagtgatagagcttcaaccgatgcggtaataaatttgtttgcttcttctatttatgccaattccaatattggagaagtagcaatagtgatgcatgaaacaattaatgatgatacagctatcgccattagaggtatatctgctagaaaaatgcattccacaaggagagacgcatttaaatcgataaacgaagagccattagctaggatttattatccatctggtaaattagagataataaacaaaaaatataggaaaagaagcgataaagagatggttgcaaaaccatatttagatactaaaggtgcattgatttgggtataccccggtttcgatccttctattttagaatactatagaaactatagaggtataataattgctggtactgggatgggacacacatccaaagagctaatacctatgttaaaagagttatcaaaagatttatttattggaataacaacccaatgtatttatggtataacccacccatatgtgtattctagaggaagagagctatcaaaatttgctacttatttacaaggcaccccagaaaagaattatgtaaaactattgtatgtcttggggaaagaaagcgatttagatggcataaaaaaagagatgaaaagattgccttgaaatcctatttattgttaatttatttgcctagagatacagaaataaaaacaaaagcgaaaaaattctttttgaaaaaaggctattatgtatatgtgggctcaatgaaaattgggattaaaagagttattaggcattttaagaaaaacaagaaaaaacattggcatatcgattttctcttagaaaaagcccaaccaatatttgctattcttttggatttagaagaaaaagagttatcaaaactaatggaaaattatggtaaacctatagaaggattcggtaataccgatttagataccaaatcaaatttgtttttccttccttctaacgagatagccctcgataaacaaagcatctatattacaatcgataaaatcggttaatgcatcttcaggggttcttactatggttctcccatgcaaattgaaagaagtatttactactactccaaaccctgttaattcttttagcttctttaacaatctatagtaattagggttatctttttcctcgacaaattggggcctcgctgttccatcgacatgcctagcagagggtagtttgtcccaatattcttttttcaacctaaaagctattgccatatgtttatgtttgtaggatttttcaaataatctctctctttcttcctctaaaacagatggacagaaaggttggaaccaaggtcttctttttacttttaaatttagcttatccctagatttgggatctcttggatcggctaatatacttctattacctaaagcccttggcccaaattccattcttccttggaatatagcgactattaaccctttagcaaccatttctgcagctaattctggccatttatctccaatatattcgtactctattttgtcagcccatctctttaatgctttttctacatcttcttttgaataacttgggccccaataaggcatttcataatcttttaaccaacttatatcatagcctaactctatagcttttaataccgctgctccagcagaagtgccatcatcagccattgctgggaatatatataattcctcaaagggagttctttcgaatatattcaaattcataattacattagctactactcctccagccattgctagtctcggtattttatatttctcatataccaaatttaaataattcactacggtatcttctagccatctttgtattgtagcagcgaaattctcatcaccaattctttctttccatttttttagtaaatcgactctttttattgtaaaatactttttaacaatttctttatttatttcccaccttaatttgtctttatttattgggaacgctttatttaatagaccatacaactctttgtctggtttaccatatgctgctaatgcttctgttttgccttcgtcagaacctggggtaaaccctaatacataggtaaacaagctatacacatttccaatgcttacagtattgaaataggaaaattggtgatctttgctacttttatatatggacaaaaatcttttacccataatccatgctggactattgtgcagtaacttcctttcttttccattaaaataccatactgtgctaaaattaccatccccatacccatctaaagtaaatactattgcttctttaccattaaagggactaaaataatatgcagaagctgcatgtgataggtggtggtcgtaaaattctatttttgcattaatcgaatatcgcttaaagaaatcatttatcgctttcaaagttaattttctgtcaataaattttggtagtggtatagtattggttaaaaccaataatatagattcctttaataatttagaaaacttgcccttttttagagcatctttaaatatttcggttttcttcttgtccattatttttttccagtcttttatgtattttggcttgtacatttctcttaggatttcagctattctaatccttactattctatgataattgttaagaaaacccggaaatcccatataccaatccatgaggggaatacctatatgctttatgtctcttctagtttctaaatttagttcttttagtatcggaccaatatgaaaaggatcgtgtttaattctagtatatctctctgttgaggccgcgaatatctcttggttttcagggtctaacaaaaagacagagctatcatggccaacccattttgttcctagtattttcattctattggcaatatttaatatttaaacttgttaataaataattaaagggatctttctttctatattgctcgccccgccatggtctcctaaaaagttatatcccctatcaataaagccattgtctttaaattgtataaaaatactatctattagatgttttactctatcggaataagagcctagcaatctctttatcgctttcttattgagttgttcaattacgatgtccaattctaattcattttttagcttttcaaatatctcatatattgtattggggtcctctttaggttttacgaataggtttctctgttctccagcaacaaattctatatctaattctttgaatacctctataggaattcttttctttgtatctaattctataaaaccatggtctgctgtaacaattaaattatatttgaacttctttaatctgttaataaaatatttcaaaaacttaatttcttctattgattgtttggaatttgggccatataaatggtttaaactatctagcttaggataatatataaaaatgaattttttgcccttttttcttgttatttttcttatgcttactattacttcggacaaacttaaatagccaaccctctgtgcgccatagtaaacatattgggaatataaactattagaatattctttaggaatgaatacatagctttctgcatcgattttttggtatattgtttcaaacccttcaagaattaaatgtttctttgtatttattggacctaaactagaaacataagctacaggagcaataacctctttgaaaatctctgaataggaataccaagcgtagatcccatggtcgccaggatatttaataaggtttaaactagttattaccggagcagtagatggtatgtttaatgtttctatagtttggaaatcttttttaatcttttttgcttgttctatggatagaccatcaaccaaaaacaaaataacatctttatctaaatctaattcggtttttcctttattataataagataaaatgttttgtgctaaatcgattatgttcattctataacatcgataattcatttaagggtaagccccgggcgggattcgaacccgcgacctgcggcttacaaggccgccgctctgccgctgagctaccggggccgatagaataatagttaacatttataaatgtttaatctctattctacgtaagtgaaattgaaaatcgtgactgtaaaaattggagacgaaagagtagaattagcgatcccagaagaagacgaagttataggtattgtagagcaagcattgggatgggcccactatagagttaaatgcttcgatggggtagaaagaatatgcagagtaccaagaccaagaagatggactaaagataaatttagattcaatgttgcagaaggaaattacgttttagtaaaaccatggcccaatagtaaagacaaaggcgacataatttataaatatgaccgcaaacaagtggaagcacttaaaaaattgggttatttagaggaagaattttgaaatatcgaatatattaagaattttaattgctcatcttcgggtaaatccctaaataagaatcccctaatgtatatatttttagcggtttcctcatctatgcccttggacattaaatacaataacgcctgttcgtttatttttcctacagatgcttcatggtagtattcgccttctttcacagtattcaatgccggcatagtgtatattttgcctttccctaatattatgccatcgcaagagctatagcctttgcctgtcccactaattaaagttttgtttattactttcccatcataggttacaaccctagattttaatatagctaccgaatcctttatataggccttactatctgtttttaataaaccctctttttgtttgtaaataacatactctcctatattagattgaattccatagaatttgtttatatttatactattcccgctagaatcattgcttatcaaatagttgtttagaatacctttctttacataatacctattcaaagaaactatcgtggatttgctatctattttatggatttttgcactttctagatggcctttaacaatggcaatggttttacccaaatggtacccttcgtttagagaagtacaataggtataaattttagcaaatgccccctcttttactataactttattcaaaactttttgattttcgcctgtggaaacatatactaagcttattggcacatttattttagtatttttagggattattatcttatagccttcgtaaccagttttgtttaatggctttacttctattcctaagttttctagcatttctatgtatttatctatagccaatttcgcaaccctcataacactgttatatatgggcatttaaataatttataatagtaaccgcatgttacccaatttggataacctaaaggaagaatatcaaaaattggaagaaaagaaacaagaaattgttgaccgtagtattagaatgtctaagctatcgaaatctcttatttattctatgattagagaagattacaaaagtgccgacaaatataaagaagagctaactaatttggcaaaaacccaaattgaagagttaaaaaagtatccaatgttttattctaacggttttataggcttacaagaatatgtagaagcgctggccttatattattacataaaagaaaatagaatcccatcaaaagaagagcttggagtagacacatgggtttatttattcggtatcggcgatatagctggggaaatattgagaaaaagcagcgaagaactaattaaaggcaatatcgaatatgctaaaaaggctaaacaagatttagaaagcttatatttggatttgctttatatagagttaaagaatttcgatttgagaaggaaattagattatgtaagcaatataataaacaagctaatagagttcattatatggaaatccaaatagtggacccgccgggattcgaacccggggcctccgccttgcaagggcggcgtcctaccgctggactacgggcccagaggttgtaatgtatggactttaaaaaattttgagaggttataaatatttttaatatttaaatacaaatttcaaccatggaagagtttatccgagctgcacaggaaagagcaaagatggatgaaaaacaacaaatagatgaatatcttaatagaataaagaaaaaaattaaagttattggtgtcgggggtgctggatgcaatactattaataggttatatgaattaggcttacaagatgttgaactaattgcagttaatgcagatgtaaaagatttggctaaaataaaagctcataaaaaagtattaataggagaagaagttactcgtggtttgggtacaggaagagaccccgaattaggagaacaagctgcaagggaaagtgagaaagtaataaaagagctattgcaaggaacagatatggtttttattacttttggccttggtgggggcacaggaactggggctggcccagttattgctgatatagccaaacaaatgggtatactaacagtagccgtagtgagttggcccttttctagtgagggtaatttaacattaagaaacgcccaatggggattagcaagattagaagaaactaccgatacacatatagttataccaaacgataaattattagaaatagcgcctaatttaccaattgctgtagcatttaaattaagcgatgaagttttagctaacactattaaaaaaaccacagagttaatattaaaacctggccaagtcacaagagatttcgcagatttgaaagtaatattagagaatggcggtttaggtatggttggctttggagaatccgattcggaaaacaaagcattagaagctattgagagagcaataaacaatccattattggatacagatgttagtggggcgaaaagggctttgttgcacatagttgcaggccccgactttaaaacagaggaattaaacaaaatattagaatatgttagcaataaactagacccagaagcgaaattattatggggtctatggattgaagaggaaaagaaaggcaaagtcgaaataatgattttagtaacagagctaaagaatgtacccgattatctaaaaataagcgaaaaaagaaagaagaaagatgaattaggaatagatgttatctaattttgttcgctcttagtacaatctctttatttttttcgtctctaaaacaagagtatatgtacttttctgcacagtatatttgagaagtatcacaactctcctccgaaggaactataaggatataccccctaccacttataaattcaccacctataattttacaaaaatatcttccatattttcctaaaattgttgcatgatatatgtacactaccttagatttgtttgcttctatgtagataggataaaaacaaaccacttctctatatagctccgtaatttttgaaggtaagttcttttttagtttgtttgtaagggcaactaaatcaagatattttccagtctgatttcgaatagtggaatcttctatataataccttaaaaggtagcctgcacttacttttacagctttgcatgccatctctgcctctctaacatcgtacagaaaatctaaaaagttttgcttgtttgcttggagtttgtcaactatgatacctaaagcaaagatcacccatattaaaatgtaaaaaaataaagttatatacgctagcattgtatataaccgccatattttatgctttttatattgcaactatactttttcccatttattatagtttccattgtcggaacaccagttacagggctcccttcaatatatttttttacttcctccttattagatgtagaaatggagtcacagctaccttcaattttcccgttttttatctcaaaattcccttgacatagtatagtagtaatttctatagtgctggttttttcttcaattttgattggaggattgttgtaaattatctcatcaaatggattgcaaaaatagttttgtgcgaattcccctccaatgttgttacaaatttctttagaaacaggagagatacagaaatagtattcattacctgcactcctttttactaagcaactaccttcatctttggatggtattacattattgtattcgaacacatcttcacaatacaagtattggggtaataacttatagggattaacgttataatatagaatatcgaaggtgtttagctttatgtaagtaaataaacatattgtttttttgccttttaatgctaaacttactggtataacaatatagggcaggtcatttatacatttagcgtatagctggggtaaaacagaaaccaaatctttataacacatgtgcaatatttttggattttttaatatagaacaatctaaagagaatttatagttagcacatatctgtttagcgtgctctttaattatatttgattcccattgcttcgatggaattttagttttttcgaaaacactattcattaatattaaagagaatgctgcccctattagtccaataagaatatatactattgtgctaatcgcgcctcgcatgtttctaaatcaataacacatacatctccggtttcgattttgttacttttatcaataatagcctctccactattctgtatatgtaaatatctttcttcgatagtatccaatggtttaccattgttgaacaaatttcctatatcgcagtatacttttttttgattaactattgcatcttttaccctagagagcaaggtgttaaaatccaaatttttcttttcggcgcattcttttatttttctaatacaatctattttcaatgtataaaagttattaacatgtatagcattgtcccttagtattgctatattatgcaataatgtgttgattgctttcacatagcagttataattttttttgaagttattgatgttatcattactcttcaaatcatctttgtttaaacaaaaatcgtttaagacatcggagagccttttgtcagaactaagacacctcactggagtatcaatggtatcgacaatgttatcttctataatcttgcaccccaacaaattatttatctcgttagctagattgtataatttactgttagaacctgttttaaaaccactaccgcaatcaaaatagtcttttatagcactttctaaactattggccaagctttcaaaaaagtctctcctcttttggttttcataattagtaatagcagtaaagatgtcacaatctttaccactacagtaatctatagtttttttataatcattcagcctaccctctaatccaaggcttcctatccaactgctaaaagcattttgtatatctttattttccactctagtcccatcggaagagtctatgtggtactgagtatcatagtatacttctgtgtttatagcatagaggaaactagtgcaaaaccttagaggcataggttttccaaaatgtttacaaacctctaatggaacaggggtaacacaataatattgtttattgtatacataacaatctactaaagtattacccaattttaattgttctaagaaataggttataaaaccttccttttcggataaagctttataacaagttaaataataattgtaattgtcaatatttgttataaccgctttttttaatttcgttttgtcctcttcttttatattttccctataaataaacttatatactgcttgtatgcaatggttatcttttgttacagccaatggcaaataaaacccttctggaaggtcttctctaaataatatttctaaagcttttattttgttatacctatcttctaacctagctatgggttgtaaattaattggatactctatattaatagtagggttttcttttggtgtggcaaattttaccaattccacgctagtaagttgttctatgttctttttacttttcaatgttgaaaaagataaataaccaactattgcaatagccaataatattagtattatatatttaatttcatcgaatatcgctctcattttattatattttggttggtttttaaataatagcaatagcctttagcgctatcggatgaagctctatacacagtaattatctttctaacttctgtatctatttgtacattgcttggtctgctatagaaatagcagacataatagttaacagtaagcaatttcattgttggcgatccatctactatatacccagaaggagtataatagtatatattatctttttgaattgggaataggctatctaaaactattactaattcatcaatggatggtaagctatttatataatctatacagtgcctccatctaaggattttacctccaatcctataacaatagggttggtttgcttctaataatattgtacctttagaactgtcgaccctacaacaatagctatctactactggtttagttcctactataccatatcttattaaagccaataaattacctctatactcttttggtattagcctatcgctttcccataggcctaaagagtcgtgggctaataaataggatacctttgcgtaaggcataggggattcatcgatagcataagggtaaaaagtatcgcttataattaagaaatacctataaggattataatcaaattccaaaggttttatcttatcgcttattcctttggttgttttatttatggattgggctgtgttgttgaatactatactaactactcctaaaaacattattagtattattagagaacctaaccaagagatcattttactaaatctaaacaatcacgctctacccaaatacctgtgcaaccagctggatcgttagaagtgttaaagagtaactgttctttaatgttatcccatttaatgcaacaaaatccattatctattgattcgttaactgttacttttatattaccccagttttccttgtttataatcaaatagtttttgtagatcccattaccctctttaggaagagtttttattgtttcgcaattattaatgtatgcgggaaacacatatatgttgggataaccgaatttaataagttttactattaataggccattcttttcttctataggcaaaatatcgatttgtccatttaaggcattacatatctcttctggagcttctatagctattaagcctttttcacaaggtattttgcaaactttcccactatcgataatatttaaatcgtatatgctatatttaaactcggtattggctttttcgaaatatttacttactatattctctattttctcttcttcaatccaacaaagttttccgaattcccctattgtgtaagaggtttttactggcacgttattggcaatttgtttggcaggggcaaaatattggttacatatatataccttgttcatactatttactaagtccttgtatccttcatcttttggagaaataacatctactttggttaaaaatatctcactttcccaaccgtttattgtttttcttggtatgtctggggaaacagcttccaatagattgtttttaattataaaacctctatctaccttgtacataaattcgttgtagtctaagaatagccaatagaatctatcaggatttaattgagaccacaccaaatctctatatctaacacaaaaatctctattagatgggaaaacttttttatcagcgatttcgccttttttgataaacgctacgcattttcctacttttaatgcgtctacttttagatccaaatcaggagtacgtgagatcgtttcagctttttcctctaaaaaattaattttttcgttttcatccttttctataaattgcttcagaatatctccattccgtaaactattaatttttactccatcttttattttataacatagagttgaaactttcacataattgtctgcctcattgggattcatctttattaattttctgtttgtatcgtcatataaaaacaatatatagcctttgtattgtttattgcgttcatcataagatatattatgtatatagccttggctgaatagtttcaaacagtcatcaaattttatgtttatctcacttattccattatatatagcgtaaactatatttaattttcctgcacttatgtctatatttttagttttaggatgatcatctttatcaacaaagttaatttcgaaagaattagaagagagcaaagtttgggaaagtttccaagtgtatttctctagtataggcttactataagggggagccctcctaaagggatcatatttataagataaagtaaactctatgggcttctcctctatagatggggcaaaattctctgtagcagtttctccaacttcttttgcttgtttagataaagccgctaatggatttactgttttgaaaaaactgaaagatattattgctatagacattagagcaacaactattgcagagattagccatattatattggatagggccctcactaagataaataaataaccccatttaaatactaagtgcagttaagtatgaagcctataatagaatactatttgcaaaaatataacaaaacaatcaatataagcgatatagcaaaattggttaaacataactctaacatctccataaagaatataactattgagaataacatctctataggcataccaaaaagccctagtatagattttaatctatcctatttgtttgttttggcgattattatttttcttataaagtttagggggttgtttagccccaacccattgaaaaggttcatttatttgctaaaattgctaggcaaaaaatattatgaatcgaatagagaatttattagaaaatccatatttaagaaatatttagaaaagaaaaatagattattcgaaaaacatatattccttctatttttgtttggaggtttctcgaagacaattttaatagaaaaagaccaatttttatgtaatcctaattattctatcttaaattatatagataaggatttgcttaagcgatacccagaatattcaatgttttttgtttacaatgggtatatttttaatatggcttccgaagttgaaggtattccaatattaaagggctattttgggatatggaatttcagttctaaaaaatgtgaaaactataaagaaagaactttgatagcgtataaagacaataatataataattggagacaaagagtttttcatttataataaaaagttaaatatagactttaatgccttggatttggccaaatttctatataaccaattcaaaaacataaacattccaataaacataaatatttaccaatatataaagggattgtctataccaatagcttatttgttttatgtttttatgactatgtttttgctgtttaggatcaaaaatattaaaataagaaagccgaaagtagatattaatttttgggggttggagttatacaaattaactggagataaaaaatatttggaaagaaaaattaatgttttgttttatattatagagcgtataaaacttctttcaaataataataaacagctatcgttaaggcaatccctaacaaggttaaaattaggcctgcccaaaagtataaatcggtttttggtaaaaaggggctgatccctataaggttataaaccaaagtagatagtatattattaattaaaggctctatatagaaataatttattagcaaagctatcccgatgggaattaaaatagagaccaaaaaatataattgatagctattctcttctaaggccctttttataaatactgctatcgatattatagctaaaaccaaggggataaacagtttatttaatatagactttaatctattcgctatagaatcataagagttttgtaatatagcataccatttgtttgctaaaaatgttaatatattatttttaaccacttcgggtttttctaataagtctttacaactaacttcgtatgggtattctagattttctttaacatattgctttagcaaaggttctgtatatttaggattaatcctacaactatattggtattgcattaacgatattaccattggcatatagaattgtttcctattgttttcgattagttgttttactttgttcggggcattatctattattggataggcaaataaaggggttaaaccgatagttaataatataagaccaattattagctctatcatttccagaattgccactctctaaagtaaaagtcgttcgacactattatgtataactcttttggattaagtatttttccgttttggggctcaaaataagtacaattgtttttttggtttggcaataatggtttgtcacatatagctgtaatacaatggcccaaggtttcatttattttatagcaaactatcgatgggttttttatttctattgtataagctttagcgttgggcaaataatatatagtattaccttctttgtataaataaagcttactattgttctgtttaacataaaaagttattttcttataaccgtttctagctaaataatatattagggaataagcaaacaaactccaatcttcacaatcccctcctttagttctaataaattcgtcaacactttctaaataatcgccgctctcttttttataagagaaacccaatttattttgcattatattaactaggcaagcgtagttaagggtatcattgttggtacatttatctaatggcaaatctgtaaaattatagttttgcgcttttattaggaatttaattctatcattgttagaatactgtgattccagattggttaattttaaccttaaataataattctcggattctaattttttgttttgttcttccaatttttttatagtttcgtttttagtctctaataaaccaatagtttggttatatttttttaaaagactaccatattggcttttcaaactgtttagattatccaatagggtttttagtttgtgctctttatatttaagctggaaatataaataaccacctatagctaataacataattaatggcaaagcaaatagtaaacgaaatatcttaaatatgaagaacattaaaatttagattgagtctaattaaaaatttattcttcttctggtaattctggttctttcttggattcgccctctttcttggttgcggctataacatcgtctatccttaatatcattattgctgcctcagttgcggattttattgcttgggattttactctgaatggttctataacacctttttcccacatatctgctactttgccttcgaatacatctacaccagcccatttttctcctttttcgtgcctacttcttagttcggccattatttctattgggtctaaacctgcgttttctgctaaggtttgtggtattatttctaaggaatcagcaaacttcaatgctgctaattgttctttagatggtaattgttgtgcccattctcttagtctttttgctagttctacttctactgctccacccccagcaactactttaccatcttttaatgcaactgccacatctttcattgcatcagttaatgctctttctatttcatcaactatatgttctgtaccacccctaattaatatagtaactgcccttggattcttgcaacctgttacaaataccatgctctctccagcaacttttctttcttctaccaattcagcttctcctagatcctctggggttaggtcttctacatttgttactatcctagcaccagttgctttagctaatttttccatatcggatttcttaacccttcttactgcgaatattccatatttagctaaatagtatgctgctaaatcatctatacctttttgtacgaatacgacattagcgcccacttcttttattttgtcgaccattctctttagcatctcttcttcttttcttaagaaagcatccaattgttcgggagaggttatatttatcctagcgtctatttctgtttctttaacttctaatgctccattgattaaagctatttttgcatttttgactactttaggcattcctggatggactctttctttgtctattaccacaccatcaactaattcagtatcttctacacctccaccaattttcttttctatttttatagaatctatatctactactgttttaccatcaacttcgtatgttacttttctaacagcatcaactaccaagtctgctaagaagtctcttgctaattctgctacttttccagtcattgctgttttagctattttctttagaacctctacatcatcttttgttattttttctgctatttcgtctaattcttttaatgccctatctgcagcttttctgtaaccttcagctataacagttggatgtacacccatgtctaataattcttcagcgttctttagcaattcaccagcgattactacagctgtagtagtaccgtctcctacttcttcttcttgggtttttgctacttcaacaattaatttcgctgcagggtgtactacttccatttgttctaatattgttacaccgtcgtttgttacagttatatctcctaattcgtctacaagcattttatccatccctctaggacctaaagtagttcttacagtttccgctactaatcttgcagccatgatatttgttcttaaagcgtctcttcctactgttcttacatagttttcgggcaaaattattacgggttgtacggatttggtcatacgtaataaaatgttatgctattaaaaacattatggctaaaattatagcttttttgtccgagcaaatctattacaatcgtttagccgaaaataaaaaataaaatggtctattagtatatttataaactaataataaaataatacaagtgaggagaaccttcagagaagctactattgctgagttctttgagaaaaataaacaattcttagggtttgatagtccaagaaaagctttagtaatgactgttaaagagctagtagataacgccctcgatgctacagaggaagcgagaatattgcctacaatcaaagttacattaaaagaaggcaaatatatgacagttagagtcgaagataacggacctggaataccttttaacgaagttccaaatgtttttggcaaattcctatatggtacaaaattccatgtgttgaaacaaaatagaggccaacaaggtattggtgctgcggcaataacattgtattcccaactaacaacgggtaaaccaattagggtatgggacaaaccaatagattcaaacaaagcttattattatgaaataatgattgatacaaaaaggaacgagcctgaagtattagtaaaaaaggaagtaaaactaaacataaaacatggactaattgttgaagcagacataaagggagaatacacaaaaggaaaacaaagcgtagaccaatatttaaaattaacagcagttgctaatccccatgcagaaataatatatagaactccaaaaggagaatacatagttttcaaaagaggcacaaatgaattgcctcccttgcctaaagaaataaaaccccatccccatggtatagaattgggacaactaaagaaaatggttagcgaacataaaggcgatctaatggatttcttaataaagaatttttcttctgtaggagaagacaaagcaaaagaaatactagctagatatatattctataaagaaggcaaagaggattttgaaaagttctttaaaagatttagagggagaaaaattgatataaaatcattaactagtgaagatttggaattattgctaaaagcaatgagagagaccaaattaaaaatgccttcagccaaagctttaataccgattggagaaaaaaatttgcaaattggtattactaaagagtatgatgtagaatatttggcagtaaaaactaggaaacctaaagtatattccgggggtataccatttttggttgaagtagctataggctatggagattttgaaaaagctgaaatattaaggtttgccaatagaaccccattattgtataaagcaggagaatgtgcaatagttaaagctataaaagatataaactggaaacgctatggttttgaggtagagaacaatttgccaaaaaatgctttgatattagtacatattgccagtgttaaagtcccatatactagtgaatcaaaagaggcaattgcagatataccagaggtaagggaagaaataaaaagagctttacaagaagtcgcaagaaaagttcagatatatattaaaaagaaagaggaaaccaaagaattggcagagaaatatttaagattttatgcctatggaaaagagatagaaagatatttgcctaagcttattgacaaagatgttgattcagtagtaactaaaaccatattaaagagattagaagaagagctattagaaaggataaagaacaacaaaaccattgtaacacatatagagaataaagactacgaaactgctaaaaagctaataaagaaaatggtgatgccattgattaagaaaaaaataattgatgaaagctttatagataggttaatccaactctacaatgtctcctaaactgtatagctcttctttcgctttttcttgggataaagccacttttttcttttccattatttttatgcccaatagtttctctatttttttagctagcttctcactaggataataatccccgctctctattttacttattgtatttatatctgtgtgtaatagctttgctaaatctgattgagttaaacccttttcttctctagccttctttattagttcattaaaattgggcacaaactctattatttcttcaacaattggtttgcgttcctctttagatattgtttttttcaaatctattatttctaggattttaccatagctagaacagcttttgcaaacttttagcttggtgccttctatttctataatgtaaagtttgtctctaatgggatctccacaaatttcacaataatacatgttatggctatatagtattttttaaaacctttgctagttaagaccaatggaagtacctttatacaatttacaagcctcgcaagtgggcaatatagaattgcccccacaatttaatgaaaaaataagatttgatgttataaaaagggctttcttagctatacaatcccataaaagacaaccttatggggcaagccctattgctggtaaacaacatagtgcatggacttctaagagaaggagaagctggagaactagctatggaagaggtatatcaagggtttccagggctatattaagaaggcatggcgcattattttattgggtagctagaaacatagcacaagctgtaaaaggtaaaaaagcccaccccccaaaggctgaaaaggattggtatgaaaaaataaacaaaaaagagagaagactagcaataaggtctgctttagccgcaactaaagaattagatttagtaaaagctaggggacacataatagataagcctgttccaatagttgtagatgggttagaacaattgagaaaaacaaaagagatacaacaattattattaaaattgggattagaaaaggaattagaaagggtatatgaaatcaaaaggagggctggtaaaggtaagagaagaggtagagcatatatagaaagaaaaggcccattaattgtggtaaatgactataacgaacaactattcaaagctgtagataacattccagggttagatatagaggaagtccctaatttgaatgtagaactactcgcccccggggcgaaaccaggaaggctattaattatttctaaagatgctttagaaactcttagagagaggaaacttttcttttaactttctataagctttaaaatattgccttaaaatatatagtttgctcacattggctgcatactccattattggatcttttattttagaggttaccatccctaaggcaggccctatagttaaagaccaaaccaaatatggaggaaacaattctttgaatttctctttgaaactaatgtctttccctctatatttctccaacaaactatctaacaatgcgacatacccaacaaacaatgcttcgctaataatgttatccaatgggtatccgaaatttgttttgggcatgtgagaatctattatataataagttccaattattcctaggtaatcaaacaaaatgtttgctaaatatttagctatgctttttcctatatattttgactgcatatcccttatgtgctctaaatatggatccttattgggagtttttattgaaatatagtctacaatctcttgagttggcaacaatactatatctttttcgttatctgaagtaatcataaataaaccatatggttttgcaattcttccatcttttaatttataatgatctatttggtaattagaaagcaaatcttgtaataacaaatcgtttacccttagaacatattctggcatttactactattaagtgataatttaaaaatggggccgccgggatttgaacccgggacctccggcgccccaggccggcgccctaccaagctgggccacggccccaagcataatataaaaactatttaaagatgttttattataatttttctctcccttgggccatcaaattctaagaataatactctctgccatgttcctaattgtaaatcgttattctctacaggtataaaaatcgaatgcccaaataaactggctaacaaatgtgcatctgcattattgtctattagattatgcttatatgggtaatcggttggcattatcctttcgaacaaattataaaaatcctctattaaattgggttcatattcgtttattgtaatagctgtggtagtgtgagggataaacaaaaacaatattccatctcttatttttatgttttctctaactaaatcagtaatatcaattatttctctccttttgtgggtttttattttgattatcatttttatttgtttgttcatcatttatacatctattggggattggcccatagtatcctgtagcctcttcataattctcttttatcaaactatgcaatttattagacaattctatttgttttacccattctccttctaattttgattggcgagccatagttcctaaaaatctaaccatctctttagataaaggctttggcttacataaagcccatggtgtaccgggtaagggcataaaataatgagcccttactttccctcctttagaaataatccatttcatcaattctatagtatttctatcgctttcttcatcttcataaggagtaccgacgataaaatcgactattggagtaaacccatattctatagaatattctacagccctctttattgtttccacatcatgtagtctatgcattagttttagtattctattatcaccactttgcgccccaataattatttttctattgtcagcatattttaataacaattctaaagtttctggtataacgaattctggtcttacttcactaggaaaagttccgaaaaatagccttcttccttcttttcttagaggttgtaacgccctaagcaaagcctctagtttttccaaaaccaatatagcacctggggatccataagcaaaagcgttaggagaaatgtaacgcatatctcttagatagcgggaatgttttactatttggtctataggtctatgtctcattctaaatcccttaaagaatggggtttgacaataattgcaaccaaagggacaacccctactaatctctatagggcctaccattcttatagattctgcgaatggtggatatttataaaaatcttctacttttgcaaaacctgtaaatttgtaaccatttaaattaaaagctaaccctctaatagttaacaaatccttattgattgctttgttcttttttagattttccaataaataatataaagtttcttctccttctcctactacagcgatatcgaaacccatctttaatgtatgtctaggcatagcactagcatggtaacctccagcgatggctatagcatttattttgctttttagcatttggatttctttttttacttcccaaacctctgtgctatagaaagaatataaaacaatttttggttttgttttgattagatcttcgaagcttctcgctattgctatttcatttatatcaaagccttgtttctctaatgcgcctaatagataagaaaaagcatttctattgtttttagttaaccttatagctatcacagtatgcatataaatgtctatttatattttcgtatatggatttagaagagattagaaaaaagaaattggaagaattaaaaaaggaagaagcaaagagaaaattgttagagcaattagaatcgaatgttatgcagtatctaacttcggaagcaaaacaaaggttatataatataaaaatggcccaccctgaaaaatatgaattggcattacaaatattatatagggtaatacagcaaaccccaacaattattgatgatacaacattaaaaaagctattggctaagctattccaaaaaagggagccaaagataagatttataaggaagtaacaaattcaataaattcgtttaccgctttttctaattctatgttttctattatttttactattttttcttcaaacaaaataggaattaacatattcatagaaagggttaaccatttctccaaatcgtttatatttatttcaggcctttttcttttgtctttttttcttctttctaatattagttttggaggcgcatatatgtatgttacagctctaacatttaaattgttaacaaaatctctagtaacaccaggaatcaatatattgtttttgtaaaataataaatgtgtatcaacaatagttaaccctttagctctttttttaatcgctttttttaagatatcttgcatttttctataaagggaaggacttttgatgtataaatctaaaattttgtccctatccatttttaaaaaagaagaaacaatatcgccggcatttatgtaagtgaaattaattcttttcattgcttcctttattattgttgtttttcccactcctggtaaacctgttactagtacaaccttcattggaataattcgctaaaaatcttttttatttgtgaacctgttagatacatcgatgctactcctgctattacgaatgcagacctatcgctagacaatggttttaaccattcccattggaatactccatacaaaataaaaaatatacccatcataaaagtagtacctacagaaaatgtagaaataaactcgctcataggcaaattttccccaacagttatttttttaattaaataatgtaataaagctagcaacaccccaaataaaactgctatagtttgataatccaatccattcaccaaaaattataatgttttgatttaaaactatagcgggcccggcgggattcgaacccgcgacttccgggttaaaagcccggcgctcttccaggctgagctacgggcccagagttaggttgggttattatttaaaaattttatagactctatttccgggtatactttttttatgtcatatacactaaaggttttgtttattatggtatataacctaccgtcttccctaataaagaatttattgtgtttttctaggaacttgtccaaattaacccacgccggaggtcccaaatgttttgtttttattgttattttctcacaacaaacccacaaataggatttgtttttgtcaaaatctatagtataggcataaacttcaataccatttttttctaaataattaacgatttttctagttaatcttgaaattttagcattttttatgtcttctttagtttcttctactctaaaggttatttctaacatggtttcaaaatcggatttattgattttgtacaaaatgttattatttaaatacaaataagaattcgctattatcaaagcgaagtttttatagcttaaagaagccgcaacattccttgttttatctactgggtctattaatattaatggagaagctgttttgtctttacccaattcatttattgcttcttttatattagaataatgcttttctatatcgataaaaaccttgggtttccattttagaataccttttaacaaattagtaaaccctttgtaatgtatagttaaaatctcgcaagcatatccagataaaccacctaaataggattcggccccataagtgttaattagtttgttaaaaattttgaaatattttgcatcattttctaaaccttttatgttcttttttacccattccacatggaattgcgaaatatctgtaacgaattccctttctaaggggctatccaattttaatattggaactatttcgatttttaatccctcataaaaggtttggaaatagtccctacttccatgtagttttatataaggaacattatgttctttcaaagtttgctctatgtatatacttatgttttgccctttgtattttttaggaaacctaacaaatatatcgatgtctctgcccaaccaagtgccttttgcgtaggaaccccctacaaaaacatcataaatatggggagttttctctaaaatgggaattatgtagtctaaagcttttttagctttttcataatcttctttttttggtaaaaattgctcaaaatttggtttaaaatacattattctgttttttctttcttttctaacaattttagtatcttttcttctagtttctctattttttcagtattttgttctacttttagctcaatgcttaataatctttcctctaacaatagcattttctttattacaactactaatccaataaacatgccaacagagattgctgcgctaacatatatgtaagggattaactgcaaatgcggtaacaaagctaataaattttggttcacttcttggattgatttgtataccatatctaaggtaacgttttgcattataatcaaaatcgaaataatttataaattttagtgagcttttacggatttatagaattttttgaatacagagcatagagttgctactactgctactataacgattaacaattctaacaaatctatgtattttgtatatgctgctactcctgcaaagcccttagcaactccaaaagacaataatactcctgctaataatagctttaacaactctaagaaagagttaaccaaatataatgctccaatctcttcgtttacaacatatttggataataggtaaaataaatagaaagatgtcgctaatgctaatgatggtgcccctattactgctgctactgccattgctattacaaataccaaacccaaaaccacatctctcatttcgaggttcatataattaattgcaatcatcttttaaaaattattacggctttatctattgatagggaatgatagccttatttaaattgtgctataaaacaagggtttaacaaaattttaaataacataaaagttgccttgttttagaagttctatcttttcttttggtagttgtattttatatagatcaatacatcttagtatttcttttgcgtctctagctaaatatatacatcttttccattcaggaatagagaaattgttcggataaattgttttgtaaatttttattggttgtatttcccatgttatggcatgtttattatagagggttaacaaactatatatattccttatgtttctgcctattgctctatagccatcgtaaaatttaaagtatttagaattgtcaaagaaataaagcttaacccatagcatattttctgctttattcataaagaatccatagaaataccagtttgcataagaaggctttttaaattccattgctttgccaaacaataatgtattttccaaatctatagttggagctaaatacaaacaaccatagccatttttgtttagtattatctttttatcaaagatataaacgcatcttaatggataagccctttcatttattgctttaattccatacggggtaggtattatgtcatacatgtatattgtgccattaactggaatagcatatttcaaatcatttgaagtcaatactactagttttttcccaaatttaacccaagggtttgcatagcctatttctgttttatacaaagtgtgcgctatataataatattgggttgcagttccatttattattggtttgtcaaattctagttttatttttagaacatgtgaacaataattgccattaacatctggtatgcatttttcaccatagttttcatcatcgttcgggaaatctaatatatattctatagtattattgtttattacttttgctttcgcccttgtcactatagtaaatatatcgtagttttcgttacttcctaatttaaggaaagcttggcttttacctatatcggtataatgtattaataaatatgtaggtctcgtcccattataattgtatttaacatttactccgaaccactcttttagtttctcttttattgtgctattaaagttggcatgtgcatataataattctaatgcctctgtttcattgtatgtgcctaaaacatacctaccaaatagatggttccaatagggataataattacccccatctaaaaaagtaactctatttgttttgcccaatatattagcaaaatattgagttatatatccataatcccaccaatgcgttattaaagcatctttttccattttgttaaatatttgttttaaccctatccaatctatttcgcctaaagcgaatactggttttacaaaataaccagtaacaaataataaagaagcaaacaatatagaactaatagatgggaataagaacatagctaatattgttgtacctactggtatagcagttattgggtttatatgtttgtaatacactagaattattagtatggacaaagctatcgatacatattttatatatttcttgtttatgttcaagttttccaattttttaaaagcgtaaccaacaagaattgggacagcaaaagcactgtaaaatatggttctaactgctatttgccctatagctaagaaaaacatattgcttaatacaaatattttagataagttgggcttagtgtaaaatatattatacaaaattataactaaataaaataataaactaggtttaaaaccaattacatagaaagaggctagtacatagaacgctaataaaatactttccgttaatgtttctccagccaagaatgcagatattacggtaaaagctataccaacccattctaatgaatcataccaatctataaattgagtgggtcttgcctcagctactgtggacataaatctattacctgaataaatattagacatttttagtctttcaattatagatgggaataggggcatcaaaaataacaacgataatattgtatataacattagtttgtgggttttgtcttttatttttagcctagtttctaaaaattcagctaatcctaatgtgaataataatataccactagcatattgggatgtatgcaaaacccaaggggttatatttaaagcgtaagcgatagccataacaaagaatatgcttaaacccggtataacaaattcttttattggcttattgtgtatccatcttaataactccattatttctagagcgaatataaatacagcagagccaccccatgctaaataaagagaaacaatcgatactaataaactaatggaatataaaattttgtattttggatttgtttcttttattagcctataataaaggaataaaattaaaatataaagaaaagaagcaattggttccttttcgaatcttcctgctaataatctataaccattagcaggaaataccgcaaatagcaaagctggtagcccagttccaaccaattctttagatatataatagtataagataacagacaaaccgaaaaagaatggattagctaataatacaaccaaattttcgtaattgtatatagaagtatttagaccgaaaaagtttgctattagcgataaaagcatagttaagggttttagaaaatataatactattggatatagaaaatgaacaggatgtggtggagtactacagaaaggaacataggctaaacaatctgggaatatatttataccatgtaatacactaaggaaatatctataagccctataaggatctgggccgagcaattcttcgggataaagagaacctattgttaccgctttaaatagaaatccagatagaaataacagaattaaaaatacaggttctttgtatttttcaattttttctagcatttttaatcgaatttgtgttttagtcttagtctgggccatattcctagggaagttaactcatctaaaaatagtttaaatgcatagctcatttctacataacttattttctctgtttctccacaaactgggcaataagcagtgcctttttctttgttttctattgctatagccccacatttttcacatactgggacttttactaaatcagaaccaaatctttcatataaactaattgctgcaccatgagataaaattacatcagtttccatttctccaaatcttaaaccaccttctctggatttaccttctgtaggttgccttgtaagtatagccatgggccctctagcccttgcatgcaatttgtttgctgctaagaatttcaatttatgataccacatcactcctacaaatatttttactttgtattcctccccagttattgggtcatacattgtttctgtgccatcctctctaaaacctaatcttaataattgttttcttaaatcttctacaggctcttcttcccatggggtaccatcaacagctttccctcttaaagaagcaacttttcctgctaccaattctattatttgccctattgtcatcctactaggcaaaccatgggggttaaatattaggtctggcactataccactcgcagtaaatggcatatctgatggaggtacaattaaccctataacacctttttgaccatgtctagatgaaaacttatctccaatctctgtaggtctttccattcttattctaactcttacttttagattgctgtcttctccttcagtaactaatacactatcaacaataccctcttcttcgcttctaactgttatagaggaatctcttttttgcaatgttgcagctccaagcaatgctagttctcccccttctaaaaaccttggtggggaaattctaccaattaatacatcttttcctttaacttctgcttctgggtatacaataccatcactttctaaatgtctataatgtttttctcccttgtagcctctaacatcgggacttggcacagttatttcatcacttaatcctaaagcatatttcctttctactgcttcataaggtctaaagtacattgttctagtaaaaccaaagtctatagcatttctattaattactaaagcatcctgtgtgttgtaaccttcgtaagccattactgcaacaaccatattatagcctgcgggtctttcatcaaacctaattaaatcatgcactattgttctaaccaaaggtttttgtaatgtttgtgctacatgcacatcggattcgaatcttaatgggtaagccacactatataaacctagggcctgtctttgagttctttctcctctatttagcctagcagattggttaaacctcgcatatggaactgcagcggataatattcctaaaattacttgaggacctatttctaaatgtgtatgttctggagttaaatcctctatatctaatgctatatatgcgttttcttcttcagcagcatctaaatattctataataccttgtttaactaaatcatcccattttagtttgccttgtgctaataactctatatgcttttgagttaattttggtttcccattctctacaacaattaaaggtctaactattctacctccatctgtataaatataaatatcattttgttcatccagataaatattaactgtttcgggcaaataacctaaacgtctttttttcctaaattcttgaacgaacttttcagggttatcggttttgcctatatatttgccattcaaatatatatcgccaaccaccgaggttttatatagtatagattaaaagcattatcagcaatccgccttttcatcattgttcagcctttttcttcatcacttctatagccttattcattagatactctttaagctcttttgggttagtaaaaccctttatatttaatttcttatacaaagcccattctttgtctgtaaatagatcggttttagagaaatagattattggattgccaaactcttttttaatttgttctaataagtttagttggttctttaatggggcgctagtttcggttaggtctataatatatattatatcgtcggctaaataccttaaagctaggactgctcttttttctattttatttattttatctaatggcctatccaatattccaggggtgtctattactgctatatctccgaaaggggttttgattttaccaatcaaaatttgttttgttgtaaatgggtaattcgcagtttttactttattgtttgttaatatatttaacaaagtggatttacccacattcggcaacccactaattaccacattgtatatagaattcccaatataagggaactcttttaagtttttttctatttctcttagctcgtcaaatggcaactcttttattatagaagatactctcccatagaaggattttcttgcatttcttatttgctctatattagatgcgcctttaattttatttttgtattgttggaatagcttatcaataaaatctgcactgtatttgaattttgctaaagttcctttatattttttaattcctatataagtatctaatagctcaacataaaatattggcatatcctttattctaggaaagctctcaactattttatttaatttagatactaaataatctcttactacttttattctattgatttcggtttcctttattttagctaatccttttttctttgattgtctatataccgcttgagaaacaattcttgctttttcgaatgctttatctaatagtttagacgcatccacctcgttagttataaaatatagagatttaaaaactcagtctccgggttcttcttcatttatctgagtagtctagcgtcatcatttataattgggctttcgcttttacgattgtgaaaaacctagaatttaaaggagaatataaagatctaataattagtggtaaaaaggttgctacaattaggattggtaagctaccaataaaaaagggacaaaaattatatatacattctgggggctatgttattggagaagcgatagtaaaagatgttaaaataataaggctaaaagatatagataacgatatggcaaaaaaagacggatttgaatcgaaagaagagttaatagctaaacttaaagagcattatccttttttaaaaaaggacgagccattaacttatatagagttcgagtttaaaccatatgaaaatcctatccctagtgaagactttgcttggcaaggtttcgaaaaaaacccaatagagattgctaaaatcggaatagaaaagaaagatgaattattgttatcaaacaaagaagttgaattgcttaaaattctaatcgaagagggctctataagaaaagcagcattaaggttaggaaatctaaagaagagagagatatttagaaggatattaagaaaaataatgcgacgccttcaatctatggagtcaactaaggatttaagtgagtgaccagttttaattgcagttttgcttgcattcgatgttaaagtagtactaattaaaattaatgccaaggataaaaccaaaataattatataattaactatcgctctcatcttccatataaataaacaaattcttgcttttctaatgcgtgctctttgacaaactttattatatcggttttttctattatgtctttatccggtttgctgtccaatttatatacttcgaatacatatctatggggtttcccttttggagggcaaggtccatcgtagccaattcctttaatattgccagtaatataattataatagtagaaatcattgtaggtttgtataaagttttcacctttgtgtgtttttggtaacccctctagtatctctttgccccaaaatattattccccaatggaaccaatcgcccgcgggagcatcggggtcatgcattattatagcataaatacctggctcgttaaactctattcttggattaatgttttcgccatcacaagtatattttttaggcatgaattcactatctatatatattttggcaaaccccatattatttgagggaggcgaaaaataataaaatatgaaaccaacggatagtagtaaagggatcgctattaaaacttttttctccatatatttttaaattttatacatttaaagctatatgttagtaagaattgctgaggaaattcttgaaaacactttaattagagttgaagataaaattagaactgggacttttcccacttttttaactatccaagttttcgtttatttgttttttatatcttttatattaacgattgcagcttttgtaataatgtattatttggttaactttttaataccaaatgtaaatgctagcttaataactttgttatcattggttgttattgtgcctatattaactatagtgactgcccgattaattgtttggctattagaagggtttagagttgataatttatctcaatcactaagaaaaagtttttttgttttgttttctttattgggtttattccttgggcctttcatttctagtggttatatactaacgctattccaaaattctactcctgttttagcccaaacgagttttgttttgccagcaatagcccaatattttagtatatcaattcctatgtttttgaaagtgctaacccataatttaagtgtagcaggagttttattattattagccatatttttgggagaagacgcatttttcatactattatataatgctgtagcgttagcaacattaattacagatttattaccgaaaacagatctagcccatgcaatagcgaattggttgttattcacaataatgtccctcccccatatgataccagaatttttagggtttttggctttctatttattaggagtctacattagttttagatattgggaaccattaaaagaatggctaaaagagaatggtttattattaagatccgaagtgtataaagaattagaagaagaaatagatataatagaaagatggcaaaagaaaatgagtgggtattatgttttaatgatgttcatactaggagtaatattaataatagttggagcaattattgaagtctttgtaacagccccaataattagggccatactaaaaatatgaaacctatcttaattttattagctgtagtattaattatagtattttttattttgttgccttttattccttacatagctactggggcagtaatagcctattttctatggcccttatataaaaggctatccaaatttgtcccaaaaagaattgcggcccttggtttaataattgttttgggcttaataattggagctacaacttattactcctctttagttttgtatgttgagttgtctaaatatttacccaccataataaaacaatatagctctaaccaaatggttggaaaatatttaccaatcgttttacaaaaactttatccaaccatattagattatgctacttctctgataaagctattgccagacatgtttttaggcatatttatagcgatgctaagcgcttactatttcttattggatggacaaaaagcaatagattatataatcaattggattgctgaaagtaaagaggatagaaaccaaataattaatacaaccaaatcttatctagatgcagtaataattggtactatatttggggctctagcccaagcggttgtgtcctatattggtttcttaatattaaacataaaacttgctttagttttatctatattggtttttatagtagcgatattgcctattgtaggtccatcaatgatatgggttttgttagccctatattattttatgcagaataacattagttttacaatattttctttagtatatggcttattcgttgtgggattgatagataatattgtaagaatgttcacagtttcgtctaaagcagatatacatcctttgttagcggcattatccatgattggggggtctatactaatgggatttgccggcctatttttgggcccagtattagttggtttagccttatctcttattgattatataaaaaacaaaagaatttattcttcttcaatttcttcgagctcctcaaattcttcgtcaatgtaataatcatcttcttcctcttctacttcttcatatagatcttccatatattcttcatattcctcatcgtactcctcttcttcttcctcttcgggtaatttctttttatctaagatgtccatggcactatttatgatgggattttgtttaaaagttagtatttttaaatacaacgaatatcttttttattataaacatatagaatgggtttgccattttttagcttaacaaagccaaatccctcaatttttacacaattaatctttatgcctttcatttctatgcatttgtcatagcaaattcgatagtaacaccaatcgttaatacattgtttgtattttatttcgcccataaattttaccctttctcccatatactcttttatatctctaaaatttatgggcttttgcaaattttgtataataaataaaattgctatgccaaaaactgccaataagttataccgcatgcaccaaataggtaaacaacgctatcaacattataattatctcttctttatctattttgcctagtttccctgctactaatagcatataggatgttattatagacaaatatatcaaagaaagctcagtaggttttagttttatttctccgtatagcaaaggaataatacctaaagccaaagttaatagagttattgtgctaccaacgctttcttctaaagtatgtttatccgataccaaagcagaaactaattggggaactaccgatactaaacctaataaaagaccaaccaaattcggggataaattagttctaataacatagtatagaacaatgtttataaccaaagacatagttaccatccctaatagaatgggtgatatctcattgtaaaaagtggaaaaatcaatcttcttacccctactttcatataaagttgctaacaatattaaaaagtaagctaatactaataataaaccatctaattctgttattattccatcaactactgctaagaatggcaaaaacaaagcaaaaactattaaatctaaatagccttctatatgtttaagggaaacttcttttttcccttttatataatagattaacatagagaatactactccaaacaatgcagaagtagtaattatgtataatggagttttataattaaaaatgttgttgccgaatacgattaataacaactctgggatagacattatcaaagaggctaaaacgaaacccgataaatgctctaacatgtttactttttttaggaacgattttatcgatactgttactaaagaactggccaaagcaacaacgaaagaggataaaactatgttaataaatatattatagtccattttatatttagcaatagatatttaaattttgatcacaccaaagcatatgatagatatatctaaaataaaattgcccaaaaacatcgatattaaacaaatcaaggaattgcctaaaaaaatacccataaaggtaaatcttaaaacggatttggttaaaataaacaaagataaagggactatctatattaacgacaaaaaaataaaagagaagctatcaaatttgctctctaagatcccctttaagaaataacacattaatataatgttttttctttgtgtggaaaaaatatatgggctttattggaaattggtacctttttattattttaatatcgtaatcctttaacttttttagttttttatattgcgattcctcccataataaatatacagttttgggcttgtttttttctataaaatgaaaaaactttctatattcattgctattgtgcccaaatggtgggttagcaatcacattttctatatttaattccaaatcgcccacatcttttattaatatttctacattatttaaacccaaaagttccttgtttttatataatatttcttcttgctcaggatctttttctattaaatatactttattccaacccactagggctaaagctaatcctaatatgccattgccagaacccaaatctgctatttcatctccaataggtatagcccacgctatatctgcagctatttcagaaggggtttggtattgctccaattcatatttaggattttttataggaagtagtttagataatattatcgctagttctttcttggatagctttctcgattctaatgatggtttctctttcttcatcatccaaatattgccttatctcctttatatgtctctctacatttggtattagttttttctccaaatagagtttttttcttttggttttacctatctctactaataattttctaactgcatcctcttcgctagcaatttttaatattatttctatggcctttttaagctcttcactagcctttttaaggttttcatctatataataatgaggttgctctttaacattactctccaaatcgaatactttaactcccattatgtttatggttttagtttttatggaataatctaaaacatctaaggaagagtataaaatacctctacttgttgcgaacttaaaataatggtcatacatgctttttataataggttggagttcttttctatattgttttatcttttttaatctttttattaattcgaaaaccaaaacattgagctttttttctaaaatagattggccctttttgtatagttttaactttctttttaattcaattagagttgttttattcttggcatacacctattatttatagaaaaatttttaaatatctatctattgcaatctcggggccgtagctcagccaggcagagcggcggattcgaagccgaagctccagacccgtaggtcgggggttcgaatccccccggccccaggctctttaaaataataaaatatttttccaagtgtgggcaattgttgaaaaggttgtccaaaagttgcctacaataaaaaaaccaaaatatttaactaatttggatagattaaaatggagcgcaatcgcagttattttatatcttttattgtcttataccccattaattggggtttctcaaactggggccggagtatttgaggaattggtagttttattaggagcgagctttggatctatagtttctttaggtataggccccataataataggttatctattggcagaactatttattggatctggagagctaaatatagatataaccacagaggaaggcaaaagaaaattcgagaatttagctagattttttatgatagtttttggtttgtttgaatctatagtaatggccacaataggttggtttaagccttctcaatttttaatatctttatttgcaatgcctttttcttttttaggaagtaacgccttcttaataggttatattttagcagttttatttattgttgcacaattaatgttgggagtaatattagcttatttattagatgatttgtctcaaaaatggggttttacctctgggatcaatttatttatattagccacagtatcgagagaattgtttgtgcaattgtttaacccattgacacaaatccctgggactcctactcctccaataggtaaaatcccccaaatcttttatttcatatcccaaggtttatacacagaagcgatagtagtagggttgcaactattagttatagttttagtaatattattgtcggtctatttttatatggttaaaataccaattccaacgagtttcggtaaaattcctgaaaaaagcttaagatacgaagttagattgatatacactgggaatatcccagttatattcgctttcgcatttttacatcaaatattattaatagcatgggttttgcagcaattgggaataccattattaggcacaatagagaatggccatcccattaatggattggtagcctacatttatcccgatacaggctttctaatatctttaattttgggtaatcttactttagataatttaataagaactataacttcttcgctattctttttaggttcatcaatattgtttagtatatattttgtattagccactggccaagattctgaaggtttagcaaaacaattatcaaaaatgtttggaaggataggactaaaaagggattatagaataataaagcattatttggataaaataattccttgtgtaaccgtattaggtggtttcattgttggatttttggctttgctaagttattgggtttctatcccaattggagggacatcgatattgttagcaacgatgatatcttatatggtgtatgaacaattgaaagaaacagggatacttaaagaattaacgcaaatcatttctaaactagaataaatttaaattatttccttttttatagaaatggagatatggactgaaaaatataggcccaagagaatagatgatataataaaccaagaagagattaaaaaagcgttaaaaagctttgtagaaaaaaagaacatgccccatttattatttgcaggccctcctgggactggcaaaactactgcagcattagcattggcccacgaactatatggagacgcatggagggagaattttttggaattaaacgccagcgatgaaagaggcatagatgttattagacataaagtaaaagaattcgctagggctaaaccaataggggatgtgccatttaaaatagttttcttagatgaagcagatgcattaacaagagatgcgcaacaagcattgagaagaataatggaaaaatactctcaaagcactaggtttatactaagctgtaactatttcagcaaaataattgagcctattcaaagcagggtaacagtatttaaatttaaacctctagaaaaagaggcttttagagagctaataaatagaattgtaaagggagaaggcctaatattagaaaatgaagatgaaataattaatgctttgtatgatattgcagaaggtgatttaagaaaagcaattaatattttacaagccgcagcgatgatgtccaaaacaattactgttgataggctatatgagatagcctctatagcgaaaccaaaagaaatagatgaagtattaaataaagctatgcagggcaatttcttagaggcaagatcaatgcttatagatctaatgctaaaatatggaatgagtggagaagatgttataaaagctatacaaaagagggtttggtctttaccaataagcgatagggaaaaactaatgattttagataaaataggagatatagagtttagaatagttgaaggggctgacgatttagtgcagttagatgcgctattagcttggttggggttaggtaaatacaaaaactttacttcttaggaacccagccttcttttattttctctattagtcctggcaaatcggtataatacattgatataacttcattaaatcttttgaaatcatctattccattttcatacatccattttaatataaaaccttttaacgctaaattccttctcaaatcttcttcgctccaacccttggtttgcattatttcataaagcaaagccgatttctttgctacaaatgtatcgtctctatatctccaatagaaagagtctaaaaccattaaagaatcggttttaggatcataatattgtatttctgttatctcgttaacccttcttattattctgtcgtttctcctagtccttatcaaaaatactacagcatctaaagcttctaatagggatttgggcaaactaattgggggagtagtaagcctatttattagggcctctatagtttcagcatggattgtgcccaaaccataatgacctgtggctaatgcttggaatagtacataggcctctcttcctctaacctcaccaacaataatccaatctggtctttgtcttaaagctgcttttaatagatcttccattgagacttctccatacctagtagggccataaccgggcctagcaacctgggcaacccagtttggattcattagatttagctctgcagtatcttcgattgttactatctttagatttggaggaataaacattgctagggcatttaagaaagaggttttacctgttgcagtacccccactaattagcatagatttgccttcctctattaatagccaaagataagacaatatctttagatctactgtgccaaattctaataactttattggagtaaatggctcttttctaaactttcttatagtaaagttagatcccctacgagaaatgtcttttccatatgtaatttgtattcttgaaccatctggtaatgtagcatctaacaatggttctgccgcggatacatatctgccggctctttgagctaatttcataacaaaagaatccaattcatcttcggaagaaaatactatatttgttggaatttccccaattataggatcgttatggaatatgtatattggaatccctacaccatcgcaagagatatcttcaatataaggatctctcattaatgggtctatcttaccatagccaacagtatccctaaaaacataatattttaatgctatttttttatcttggtctaattttattttaagcattttccaaatttcatccaccaatttagacacatgttggatagcttttgtttcatcttttagttcataataatccaattctattctatccaataatatatttattgtatcgtcaataatttttcgctcctttgcattgatagggggctctactgcatagtaaactagtgatttcaaagtttcatcatatttaatcacggcttttgctaatacctttccattatactcaaatagggggtactctctatagaaatttttataatcaatttcttcttttttagttatataaatgggttgccccccaatagtaagctctggtattggtattgctccttttttagttttctcttttttaccttttttgactatagaggaaacctgtattactggggctataacaggcattggttgcatgggttgttgtataggttgtgggagttgaactggattagttatagggttagtactattactaggcataggatttatagaaggattcgaaacagtttgtgcattagatgaattagacatattaacattaagatttatttctaagggtttcggagtattctttctttttagggcttctatagccttccttattaaaaaggacaccattgaaaatttttaaaaaggttatctaaatatcttagttttttactttctagtgctaaagggtctaaatattgtgttaaacttattcggtatagcttccttgtaattactaattggaatacccttatatgaaattatgctagtactaacatttgggtttatgctattgtaggacatagaattggatatgttctcccaatagagcgagatgtaaaaagtataagttttatctttcgttaagctatcaaaatagacccctattttgtttgatggtatgttattacagttattcccattccaatagcagaattttaatattttatcgttatagactattatataagcatcgctcaaccatgttggtaagctaacatttaccaatacattactataattgttgtttacggtaaacgtaactttgtagctatataaactggcattagctaatgttaaataaacattctgattagtgctataatacaaatcgcagtttattctattaaatggcattaataatcctataccgattggtatagaaggtttttcaaagaacctaatttctttagcttttgtaatatttattgttatgctatcaaattttgatgcactcaaattctgctttattgttagataagaattataattagatgggtctattttatatacaaaaacgttcttgccattcttaataatccagtattgcccattataattgttgccattaatattgaaatggccatctatgtataaggaaccaatagttagatttatgctacaattaccatattcgctccaattatcacaataatatctttttggtataattattggataaaaatattgacaaaaattactagttgtatctataaaaggggtcacagtaccatataaaaagctatattcgttcaaattaatatggcaattgcctatacataataactcttgcagaaaatagtatgggtaatatggtttttcaattttttgttttggaaaaacctctatatagtattggttatgtatattctgaaatattataggcaaagataaaaccaataaagtaaaagcaattatatagaattggctcctcatcttacatgagggtatttccattgcattggtttctttttaattaaaaagtatgcaatatgtattatatacattagtaaaacatatggggcagttattaataataataactcatttttaatcgctttcccgctaaatctcgcaaaccctctaaatgaagtccaagctctcgcggataaaacaatattgtgctttttatgaaaagtactatttaatctataatggaaatctaaatcttctccgggccagaagtttctaaaaccccctatagcttttgcttcctttgttctgcatgcagttaaattagttaaaccaacttttgctcctaataatgtgcctaatttcattaaaggagaaaacaaaaataactgtaagaagtttaataacaaaatagttgggatacttaaccaatctttgtcatattttggagatattagcattactgggtaattggtgccatggtttgggtgtttttttagatcttcaatcattttctctattgtatcttcgcttaaggatacgtctccatctataaatacggtatattcgcctttagcattgaataaaccaatatttcttgcaatgcctgcgcctttacctgggtcttctagtatgcgccattcgaaaaatattttatctttgtttttttccatgaattcctctattacttttctcgttggatcattttttggagtaacaaaaataacctcaaaatctttatatttttgttttaacaaagattcaagcaaatattttatatacttttcttccctatatgctataacaactatcgatgtttcgaccattaaataatatttttccaaatttttaaaaatcgttttttggaatacaacgtgtattcgaaattgttgataaaaaaatattatgaagaacatccaattactagaccccaattagattcttttaattggctaatagaccatggtttaaaaagaataatccaagaagtaggaaaagtagaattcgaagtaactcctgaaggggttaaagaagcttatttagttgctgtagacatagaagttggaaaagcccaaataatagatatacaaggacccaggataatatatccctacgaagctaggttaaggcaattaacttactctgctccagttagagttagatttcaatattatgaggatggagaattaaaagaagatagatgggttaaaattggagaattacctgtaatggttagaagtaaaatatgtaatacctatggtctaagcgaagaagagttgttaaaagtttacgaagacccattagaccctgggggatatttcataatcaatggggtagatagagtaatagtaatggaagaaaatttagcacctaatcaattttatgtgcaagaaaacaatggagaatatgtagggaaaatgctttctgtaagggggggaagaaaaataccaataacaatagaattgaaaaaagatgggattttgtatttaactttctctaggttagaaaatgtcccattgataccattcgtaaaagtattaggtataaaagataatgaaatagctcaatacttaggtaattacgaagagacttttattaatttattagagtttgccgaccaagattatgaatcaataattctaggaaaaattaagataccaggtttaacaaaagaagaaaaacaagccaaatacgaaagattatatgaaatagtggataactatttgttaccccatattggatatgatccaagccttagaaggttaaaagcaataaacttactaaagtatgcatcgaaattattaaaattagcccatggtgaaataaaagaagatgatagagaccactatatgaataaaagaattttaatggctggcgatttagttggggaattgtttagaagtgcattctatgcacaattgcaaaacttaaaatacatctatcaaaggaatgcaaaaaggaaaaaaattacttctatagaagaattcgtttcagtagatgtattcaatcaaaggatagaaactgctttcgctacaggtcaatgggttggaggcaaaacaggtataagccaactattggatagaactaactatttagctacagtttgggctttgaatagagttaccacatctttagaggaagagaatgaaatgattgaagcaagaagaacccatggtacacattggggaaggttagaccctatagatactccagaagacaaatctataggattaagaaaagctttgactttactatctaaaattactgttgatatagaggaagaaaaaattttgcccataataaaagagttgggtgcaaaattagaatatgagagaaattcttaaacttgcactaaaaaatatacaaaggcgaaagcttaggtctttgttaacaaccataggagtaacaattggaataggcgcaataaactattttttgatattgtctaaaagtttagagtatggaataattaatacattcgaaagtttgggaaaggataaacttattattttgccaggcaaaagggttggttttagctttagcacagggtggtatttttctaaatcgatagtaaattcgatagagcatttgccttcgataaaatatgttattcctgggaaatttgtaactagcacgatagaacacaaaaataaacaattgaatgttgtaatatatggctttcctttagataaaatgagattgttaacacaattgggatataacttaagagaagggcgattcccttcaaacaataaagaatgtgttgtcggttatggagtatacaaagatttgtctatagagattggcgataaaatatctaataaattcaaatgcaaagttgtagggattttagagcaaataggtagccaaagagaagattatactttaatagtcagcgagaatgttttagagaaacattataatttaaaccaatataattttattttcgctatagcgaaagacattgatttggcaaaaaaagagttatcgaaattgttagataaaacaatcaaagattatactattttaactacagaacaattagctaaaaggtttgcctctttattgggattcgtttccctatttatcagtgctattgccgggattagcttaattaacgccataatagggataatgaatactatgtatatggttattaccgagagaattagtgagattggcatattaagagcgattggggctaaaaaaagagatatattatttttgtttttgttcgaaagcggttttctatccttggttgggggtatagtaggtatagctatatcaacaataattgcattgataactataatagtattcaaatccatgggctttaaggctatattttatattaacccattgattgtattaggattattggttttatctttcgttgttggaattatagcaggtttgttaccatctaaaaaagcttctgaattagaaccagtaaaagcgttaaggagagtttagctccttactaataccaattttcttctctttactactttgtctgggtatactattacacctttgtctgttatttcgaatgggtgccttctcatatcgtgtttagtacccctcattttccatattattagagatcttaccaactctccatctatttcgtctaagtctaatctaattataccgtctgctgcatgttctacaccagggccaccgaaacctctttctgctacagatacttgggatacgaagaaagctgtaataccaaaaccgctaaagactttctttaacatcattactatgtttcttgctacacttggtttggttagatacaatgttgttactgaatctattacgcccctaactgggggtttgccagtattctcttcaatccaagaaattgcttcttttactacatcaattagagatctaacatctgttggatctggtactacgaatctttctctttctgctgctctgcctatacccccagtaaagccatcaatcatagcaaacatgcccttttcttcatatggtgttggatcccagccgaaatttttcatgttctctctaacagcgactggatgttcttctaatgttacatatattcctggttctccattttgtaaaccataataaatgtattgttgcgacataatagatttaccagttccaggacctccagctaacaatactacatttctttttggtatacctccattcaatagttcgtccattccagggatacctgtttttactctttggatcgccatactatttttatagttaagtatttaaatatttgatctgactaaatcgcatggcccaggtatggaaatactatgaaataaaagatggcaaattaattagaaaaaagaaggtttgcccaagatgtgggtcttttatggcagagcataaagatagataccattgtggtaaatgcggatatacagaatggaaagtagaaagaccaaaaattgttatacatggagcaacaatagaataatttttaaattacttctatattagatactgcggccgtgcccgagcggtcgaaggggtcgggcttaggacccgatgggttagtcccgtccggggttcgaatccccgcggccgcactataggttagcaggttttagagataatttcattggcccatataatggtctaaatggataccctttttgcaattcttccatttttgatattaagtcttctaaactagtttcataaactttgttttcatatctgtctcttacagttattttgttattttttatttctttttctcctattacaattatatatggtacccaaagtgattcggcatctttaatttttttatttaaggtttcatccctatcatctaattcaactctaaatttgctttctaattctttggctatttgttcagcatattctaaatatttctcactaactgggataacccttacttgtactgggcttatccaaaatggcaatacaggtttttcttttcttagagcagtatcaaataaagcataaatatatctttctatagaacctaaaatggcgttgtgcaatataataacatgcttttcagatccgtctttgtctatatattttataccaaaccttttgctattgtgtaaatctatttgagtagtgccaatctctcttggccttcctaaaacatcaataatatggtattcaatatttataatccaatatctttggtcagatttaggatatattgctaacaataaaggtttcttaacgtctttgtatatctgctctattatgtatttgtatttttcataatcctcgaacgatgctacattaatcaacaattcataatctctaccaattttctttatctcttccataatttttttgtgcatatttaagaattgttctactgcttcgtctaggtctttagtgaaaacatgcaaatcaggcatatagaattttcttaacctaaaagctaataccacttctcctggttgttcaaacctatatgaatctgctacttctaacataccaaagggcacattcttataagacaaagttaaatctttggctatagcgaattgttgaaagcaagcggcataccttaaaacgaacacagacttatcggattgcacttcatacattctttctccgaatagtttggcatgttctgcaacaggcccttgttttaaatcaaacatgttagtgcctttaactataaaaactgggaaaggcaattctttagctattttaatagaataatcattaactaaatctaccattagagcagcataaggtttataacgcatatgcccataatccgacagtggttcccattcaaatccaaatttctttgctacatcattcaatgggtttttttctatttcttctccttcactaaatacttctttcaaaaccattttctcaaaatcttggtttattggtataggcaattctatcccatcttttggcaactcaaaatgcaatttttctttattctcaatctctttatagtcctttactaatattttatccttttttccaacaattatatattctttttccccatcgtaaataagatagactttatttccttcttcttttttaacctttttgggcttaatggttctagacaattccgctaatgggtggcctttaacatggatttcaaattctttataccaaccaaatggtgctttatatacctcgaaaccctcactttttaataaatcgtatgctttatctaatacttcttttgccaattttggagaagagggattgttagttagatgtacatatggatatagtacaactactttttcttttatcccaattttttctaaaactttctttatttcttcgaccaattgttctgccacgcttaaattgtctccatgctctacagcaacgaatactgctaaatgttctttatttacatcaaattcaggtttttctaattggtctgcttcctttaatgccttttgtctagcgattacttttatcctattggaatgcaaaaacagtgcccgcattataataaaaaagcttatagtataaagcttaaaatttttaaatgcaagataacataaagcctgccgggcgtagctcagcggcagagcggccggctgtagttgtatagcagataccggcaggtcgggggttcgaatccccccgcccggacttaccttttcattattactttttttagaataaaatctgtcgaaacctccatcatcataattcagcgcactacgacttcttcacaaaatgggcccgcggggattcgaaccccggacctccgccttgtaagggcggcgtcatacccctagactacgggcccagaaggcaattaacttttgatttaaaaatataatgctaatgtttataaacagtttttagaccaatcccaatggtgttagaaataggaagagttgttgttaaaactgccggccgcgaggccggaagagtaggagtagtagtagacattatagataggaatttcgtattaatcgatggcgatttaaagagaagaaaagtaaatgttaaacatgtggaaccaactccaaagaaaatagacataccaaaaggggctgatacgagaacagttgttgaaaaaatgatagaaaatggaataaaagttagcctatggaaattaagaagggacaatctaaaagatttggttgataaattaatagaaaaattcccagaagtaaaagaagatttagagaggttaaaagctataggtaaatggtaaagctttaaaactatttttagtttaaccccccatggacattaacgaaattagaagacatgtaatggaaggaaaagctgtaataggtacaaacaaaactcttaaattgttaaagcttggacaactttctgctgtagtattagctaaaaatgttcccgattatataaaagaagacatagaatattatgccaaactatctaatataccagtaatacaagtagatttgtttaacgatgaattaggcgcagctctaaagaaaaggtttaaagttagtgttgtaggaatcttaaaataatatggacgatatagttttggcttttgaagccattactggaggtaaaccgatcgcttattatgatgatggtaagagaatactatttgtggtagatggtaaaaatgttggcaaatacataggcaaaggcggaaaaaacgttaagcttttatctacagcattgaaaagagacatatatattgccggttattatgaagatcctgttcaattcataaaaagtttctatagagaattagatataagcgaaatcgtaaaagaaggcaataaatatattgttaaaataaacgatagacaacaaagggctatggctataggaaaagaaggatggagaataaatctattaaatagagctttaaaagaattgtataatgctagtgctgagatttttcaacccaaggaagaaaaccaacaatgataactataccaacagaggttaaaattttagaagaaacagacaacttaataaaagtacaatttaagggcgaaacccacacattatttaacgcattaaaagagatagcttatacaattaatggggtaaaaaaagctgcatattttatagaacatccattaaaagataataattactttattattgaaactgatggttccataaaagcaagagatgccttaatacaggcattgaaaaaactaaaagaagaattactaaattttaaagattggtactactctaatctttaaaattggctctttttgatggtctaactttttctgcgcccaagcccccatttcttaaccccctaaatttcctagcgctagaggttttccctctaaacactctacccctttggtttttttgtaataaccaaacatattcgggcctgttataaatattgggattaaacggatctaccaaaataacttcataccatttatataaaccatcttctccaacccaataagagcctaatacttccatattcctatgtaagcggttagccctctcttcagcaatccattgtaaattaactcccaaaggtctaatcctatactcagcttttggtcttcttcccccttttatttcttctctttttcttgtaccttttcttactctaaccctaacaatttttatgcctggcaatggtttgtaacctaaagccctagccctatctattcttgttggtctttccacttcaacaattgggggttctctcctccattgttggattctttgtttatataattctcctaaaaattcttttggatccttatataatgctctcacatattggtataatcccattcaaaagccaatagattttatttataaatagcatttatgctaaaccaaatgaagataccatctatgataaagacatattgcccttattgtaaaaggcacacaatacatatagttaagcaagttagaccttccacaaaaaaatctgtattaagtgctggtaaaagaagaatggaaagaaacactgttggtaaaggtaaccacggcaggtatagcagaaggccaataacccaatggaaaagagttggtgttaaaggtggatcaaaaagaatagatttaagattagtttgtgaagaatgtgggaaagctataataaaaacattgccaagaactaagaaattcgaaatagtcccagttaaagcatgaacgaagaagtagttttacctcctggttataaagtaggtaaaaatgcaataggtgatgtatataaagaaggcgattactattataccaaatacatttccacaataagaaagcagggcgataaaataaaagttatagctctaacaaaagtttataccccttccataggggataatgttatagggatagtttatggtttaaacccaataggtttagaagtaaacatagaagccccatataaagcaataatcccttacaaaattgttggcgatccattgaagttttataataaaatcgtcttcgcaacaattagctctatatccaaggttggtattataactttgtcaaatccaaaaatagtaaacggtttattattaaaaattaaccctgcaaaagttgcgagagttattggtaaaaatggttctatgatcaaaacaataaaagaaaaatttggcgttaatattatagttggaaaaaatggattaataataataaaaggggaaacaaaagatgtggaaatggccgcaaaagtaataaaagaaatagaaaggagagcccataggaaaggccttactgattgggttaagaatctctaatgccgataggtttagagatacatatacaattaaatactgaaacaaagctattttgtccttgtaaaatagatccaaatgcagagcctaatactaatgtatgtgagatatgcctaggataccctggcgcaaagccaaggctaaacaaaaaagctctggaattagcaacaaaaattgctaaagcgttaaattgtaaaataaataagaaaatcctattctctagaaaagtatatttctatccagatttgcctaaaaattaccaaataacccaatatagtaatgttttaggggagaatggttatattgatttaggaaacaaaaagataagaattagagaaatacatattgaagaagacccagcaaaaatagtagaacacaaagaaggatatatattattggatttcaatagaagtggtactccattggtagaaatagttaccgaaccagatttcgaaaatgctgatgaggttaaagcgtttttcaaaaaactattggccatattggattatttagatgcctttgatccagaaaaaggtataatcaaagcagatgttaatgtttctatcccagggggagaaagagtagaagtaaaaaatgtaactggtctaaaaaatatagaacaagccataatttatgaattaactagacaaaaagaaatagtaaaagctgggggtaaaataaagagagaaaccaggcattttatagagaaatccaaaaaaaccataccagcaagggctaaagaatatgaagaagattacggttacatcttcgataatgatctaccatattacgaagtgccagatgttgaattaccaataatgccttgggatctagaaaaagagctaataaatttgggagtacaaaaaaatttagcagaagccattgcgtattattctaaaaagcatgctttcttatttttgaatatagctaaagaaaacaaagagattgctaatgaattagctaaatggtaccaagtgttttttgaaacagaagcagatattaaaacagttgaaaaactaaaagacgaatttattgaagcggtaaaattgtatttaaatggatatctcaataaccaaggtataagaaaatccataaaagagggcataaaggagggctctatactaaaagcagtagagcgctataaaattgtttatccatccgatgaagagatattgagaataataaaacaaaacgggaaagccatttacgattatttaaatgggaaaaaacaggcaattaatgctttactcggctctgtaatgaaggcttaccattcgagagtagatcccaaatgggttctaaataaaatacaagagttaataaataaatactataacaaatccaatggatgaaaaagaaatagaggaaatactagaggaaaataaaaggctaaaatctatggtaaattatttgcaaaaagaattagaaaaatttagaagtccccccttagttgtagcagaagtaataaagccttatggagaaagagcaatcgtaagattgccaacgggtatggaattgttagtggaaaagctatcaaaaatagaaatagagccaggggatactgtatttctaaaccaatctaatatggttattgtaggcaaagcagaaaaaaggaaaaaattcaacatcgatgcttttgttattactgagaaaccaaatgtagattggtctcaaattggtgggcttaaagagcaaatcgaagaaattagagaggcaattgaattaccattaactaaaccagagatattcgaaaaaataggtatagaacctccaaaaggtgttctattgtatggcccccctggaactggtaaaacattaataggaaaagctttagccaaatccgctaatgccacttttatatatatagtaggttctgagctagttcaaaaatatattggagagggtgcaaaactagttaaagaattgtttgattatgctagggagcacgccccagcgatagtttttattgatgaaatagatgctatcgctgctagaagaatagagactggcacttctggagaaagagaagtacaaagaacttttatgcagcttttagcagaaatagatggttttaaacctttagataaggtaaaggttattggtgcaaccaatagattagatatattagatcctgctatattaagacctggcagattcgatagaataatacatattcctttgcctgacaaacaaggaagaatagaaatattcaaaatacatactaggaaaatgagaactaaagacatagattattcattattagcagagttaaccgaaggttttagcggggcagagataaaacaagtttgtatagaagcaggttatttggcgataagaaataaaagggattatgttatattagaggatttcataaaagcgatagacaaagtaaagaaaatgcgtaaaaaagaggaataccaacgctttttaaaaggtttatcttatttcggctaatgctctatttcgatccaaatgttttagttgaaattataaccaatggagaaaatgctgaaaaggcaaaacaaatttatgaaaccattatagataaagaattatatgtctatgaaatacatttgggaatagtattagctaaacttgagagaaaacattatgattatgcaaagactttcgctaatgcaataaaaaaactaaacattaaattattgcatatagatattaaaaagttagttgaactatgggcccaattaggttctatagagaaagctgtatttgagatagcaaaaagggaaggctacgaaattgttacaatttaacttctaaagatattttgggttctcccttgtaatattctttcgcaacctcttctgctactttatctaataattcttttcctttctttgttatagcccttccttttcttgggctatcaacccattggattaaaccagctttttccaattgttgcaatatatatctcaatagtttaccgcttcctttgactttgtgcctttttctcattccatgtctccttctttttgtgcctccataatattttcttagcctagataaaccaattgggcctaataaatatactcttcttaatacagatgctacccttttataccaccaaacttcgactggctcatctggaggtctttcattagcagggtttgttttaataaatttggcccactctggaggttttaattcttcatattgttttaatacttcgctaagcttttcaaccattaattggccaggcacatcttttactgttaccatgggaagcactatttatgatatttaaaaaatgctattgctctataatatgaaggtatggttcaatggccaaatcttagattacgaagatgtaagaataccaatagatacacatgctttacattatggctcttcagtattcgaaggaattaggtcctataaagcaaaaaagggagtagcagtatttagaaatgaagaccacgtaaaaaggtttttctattcgatgcaaactcttagaatgaaaataaaatttgacgaaaacactattagagaggctataaaagaagttgttagggtaaacaatttagaagattcatatataaggccaattgccttttattctaaaggaggaataggattagacccaagaaaaaatgaagtggatatagctatatttgctataccatggggcaaatatctaaaagaagaagcaagggtaacaattgtttcttatgctaggcctaatactttaataacaaatcccaaagccaaaattggcggtatgtatgttaattctattttagctactttagaagcaaaagaaagaggttttgacgaagctattatgttggatttaaatgggtttgtcgctgaaggccctggagaaaacatatttttaatatacaaagatagcaaaactgcggtaactccaatagaaggttctatattacctgggataactagagatacagtaaaacatttattgagagacctaggttataatgtaatagaaagaaatgttttagtcgatgaactatttatcgcagatgagttattttttgttggcactgcagcggaggttacaccaataaaagaattagatggacaaaccttcgatacaagttttggtaaaaaagtttatgaagaatatatgaaagttgttagaggagaaaacaaaaaatatgaatattggttagattatatataaattttgactttgtttatttttttatcatcgctatccaatatttctaatacgtaattgtttatccttattttttctccttttttaggaattctgtgggttttctccaatattaaaccagcaattgtagaatagttttttggcagaggcaaatttaaattatatttatcgttaatatcattaacattttcgtctccatcaacaataatatatctatgctctttcattgcatctatgttataatctggtaaagataacaaatctctaagcaaagcatccaattctattactcctatagcgtctccatattcgtttactactattgctaaatctttttgcgatttaaccatcttttctagtaatgttttaattgtaatgttttgaggcacatataatggctttaatatttggttatctctaatatagccaactatattctcttcgtctcctttatagattaaagcaaaactttcatttgtcggatggcttactaatttataatcagataatggttttttaacaacatttaccggcatatccaataaagttaacaattttttaaccatccttccttctaattcttgcaaatatcttttctttatagcctcgtcaataatatttattatttcggttttacttaatttattattagctttcccaaaaagggatgctaacttatgataaaacaatactaatggatagaatattaatttaactaaataaatcaatggggcgaattttaatattaactcgggtctcgccaaagctaaatatttagggattatttccccgaaagttattattagaatagtaactattattgttgctggaagtatccctagaaaccctagttggtttactaaatagtccgtaactaatactgaaattaaaacattaacgaaattattcgctattaggatagcgattaaggttttatccaaatcttccttaagttttcttactattttatcccttattttataggaagggtaataaactattgcggtttcgtaagaggaaaataaagctgagagtaatattaatattaaaggcagcattttgtagaaataagaaaaatggattaaaaaatatagttcgaacttcgaaccagtagagttcgaaatttttaaaatataactgaatatattcgcatggtcgtcttaggccaaaagttcccagaagtagaagtacaaacaacacacggaagaatgagattgccagaccattatagagggaagtggtttgtattgttttcccacccagcagactttacaccagtatgtactacagaattcgtagagtttgccagaaactatgacaaatttaaagcaatgaacacagagttaattgggttatcaatagaccaagtatttagccatataaaatggatagaatggattaaagagaaattcaatgtagaaataccattcccagtaattgcagatgaccaaggagaattagcaagaatgttaggaatgatttccccatacaaaggcacaaacacagtaagagcagtatttattgtagacccagaaggttacataagagctatgttatactacccacaagaaactggaagaaacataccagaaatattaagattggtcgaagcattacaaacagcagacaaatatggagtagcaaccccagctaactggcatgtcgatagatacgaattcaaaccatcttcaatagtaggaaacgatgtaataataccaccagcatctagcttagaagaaaagaaagacagagaagaaagagcaaagaaaggcgaaatagaatgcttcgattggtggttctgccacaaaaagctagagtaatttcaaattctttttaacatctttatttagataggttttattttataatggatatagaaacagatatagaattccctaaaaatattgttggcaatgttctaaaacttttgaataaagacaattataaaataacagacattgtggatgatattttatactatgaaggaacaaaaaattttattgtatatgagaaagatgataaactggtagctttgatttttgataaaataaatttgagcgagtcgtgtgaagaagtattaagcccaataggatgggccgatcttataatatctataataaaagagagccatccaaaatatgagccctgtattataatattttataacctacatggggagaaagcaataattgttaacgaaaaaggagcaaaaacctttgatgaattatgcttgcataaagttaaaaatatggaccaattgcttaatctagaatcttagggaattcgatttcatttatttctctaaagttacccagatgtttaacccaattagcttttgctcttatttcttctaatattttgttatttaacaaatctgattccacataaaataaatatttacctatctctcttttgtcgggcctagactctaattttcttaaatttatattgtgtttatggaatatctccaacacttcttttaaagagccaggcttatcttctaaagagaaaactaaagcgctatactttggattgggcaattgctttttaccaataattataaatctagttttgttttctttattatcctcgatatgctcatcataaatttttagcccatagaatattgctgcagtttttgatgttattgctaaagaatactcgtctaacatagatattgcttcagaagttgaatttgaataaactatctctgcattagggaattttttcgaaatatattccatagattgtgcaatagcttgggggtgagatattattctttttacttctttaacatttttaccaactaaacataggtttattctatgtatatactcgcccacaattttaacattgtattttattagggaatccaaggtttcattcacactacctcctaaaacattctctataggcactatacccaaagcaatttcgttattttccaatgcatcaaaaatatgggatatctttctataatattttatatttagcctggttttatttaattttagtgctacttcatcactaaaacttcctattgggcccaaaactcctatccaaggctttggattttctatatgcttagcccaagatattagcaattcaattaattgatctgtatacaaaggattaagctctctttctttggcgaattctagtaaaatatttctcttttctatttcccattttttatcctctataggtaaatttcttagttcttttatttcttttatttgctttgccaaatcgtttcttatttttattaagtctaaaattagtttgtcaataaccataatttgttttctaatatctttgttccatagttttgataaattcaataacaatgccctagagaaaccttctaccctctcttttggtatataatcttctatattgtttgatacttctttcaaaaatttgatgtagttctctctataggttttagcattcttttctttttgtatatctaataagatttgcgggttctgttctaacaatctttctgacaatctatataaagcttcggcagatgctgtttttattgggaatctcctagcgaaatgataataagatattaacaataaatgagttacaacttgcaattcatttattttttcatgttcctctaaagacatttcaattaaatcaaaatccaaaaattgcaaaaagcttttgtctgtgctttcttttattacaactattttagagaattcctcatagatgctgggcccaaacaaaggatgcaaagataaaaacttaaaaccatactgttctattataggaattactacatcttttttagaggctaaatctattattaccccattaaaattgttttcttttaattttgataatatttcattataagaattttctggtatagccaatatagcatatttaaatttgctaaactcgttttcttcaatttctttaatcgatcgagaatatactttaacatttaacccttttctttttaaataattataaaaatactggcctaatcttccaaatccaataattaatatcataaccatatataggtttataatttaaaattacaaaaatggcaatgaaaatactattgtttcatccatttttgaaatctatggggggagctgaaaagttaatctatgagtattcgaaaagatcaaaacataaaatatatatcttaagttggatatacattaaaaacaaaacattttcttttgaggctgtatatagtattttaggtaataagttagaaagcatagcaagatcttattttggtaggttattgtttttgcctttgtctttattaaagtttcccgaagattttgatgttttggttatttctacttctggtatatcgattctatcactattgggcaaaaaaattaatatcccaaaattggcttatgtacataccccattaagagcagcttatcctttagacataatatggaatataaattatagatttagacagctaaaaaaatatttctacaaaagcgcatatacaatttataattttttagaaaaaaatgcttggtctaaattggatttcgcagtatttaattcttatttatctagaaaaagggcattagataaaaaactaatagatttagataaaacagcaattatttatcctggagccaatttggaatctctatattataaagaaccagaaaactattttttgtatgttgcgaggtttaatatcataaaaaggcaacacatattaattaaagcatttgcaaagttttctaaaaaatacgattataaattaattttggttggagggcttgagaataaaagatatttcattcgtttgttaaaattaatcaagaaatataatctagaaaatagagtaaagttgctttataatttgccataccaaaaaataatagaactttattctaaagcattggcttttgttcatatcccatttatggaagactttggaatagccccattagaagcagctgcggctggtaaatacataattaatgtatacccttctgggaattatgagatattaaaggattttcctgggatatattggattaaagagagattttacgatgagaagatggtagaagaagtgtataaagcgttagaatattttataaaaaataaagacgaattaatagaaaaaggtaaagagaatagaaagaaaataaaagagctggacttatcatgggataggtttgctaaggagatggataaaataatagaaactaggatagtttaactaaaccttttctttttacatagtttaaagcaattttgaataattcaaaacccattacaaaatataatatagacaaaaacagagccagagttaaatacgatgtatttacagctttccccgtaatgagatttctaaattcttcaaccaaaacgaaaggtagtattagtataataaagctatagaaccaaaagaaagataaagtaatcctttttgggagaaacacttctattaaatctgatagcaatccccataaactaagagattcgcttcctgataaaacaaacaatggagaaagaataaaagctaaagcataggatgagagttgtataatgagagcaaacaaaaatattgataatatactttctatgggaatagcatttaataagactaatggaactaatgtacctataaatactaacaaagtttgtataaaatcctgtaaaaatctatgtataatagtgtatactggcgattcctatagaataatcacagataacatatctaaagagttaaaaaatgtaatagaaattctatctaaatacagattaacagaatatatagaaagcatagaaataaaagagcttacattagaagatgtgttcgcttattttgttaaccagcaatggaaagaataatagatgtcataaaccatataataattaatacctatctttacattgttttgtttaatgaaatatcgatttatcctattttactatggttggtagtagatttggactattttataggaaaacatagagttactttccataatgttttttatttattttttatttcaatggttttttctataatatatagtaaaacccttctttatacgccaaagttttttgctatattgttatcacatatcatattcgattttctatttgggggagtgtgctttttgtataaactatgtgctaaaggcggtataaaatacgattacctttcgttagagataataagtttggctattaatttatttattttatctatggtgttgtctttttatatcgataaattattctaaccaaatgaaatcgctaatagcatttatagcttttataataaccggtttcctagcaacaaaaattctttcctattttttagagggaataataaaaaagctagtaatagatagcaatactaaaatagacgatataatatacaactctctgcgattacctttactattaatagtgtttttgatatttttgtatattggtattttgttagccccaatacaaatagatattaactttgttaataatgtatttaagtttgtctctattttagttggcacatatgctatagtgaattttgttgatgggatatttgaatattatataataccatgggccgaaaagaccgaaactaaattagacgaacatctaataaagccattaagaaaattaattagattattaataatagtttttggtttattgacagcactaagctctgttggttatgatataacaacaatattagccggtttaggtataggtggtttagccttcgctttggcaatgcaagacacaataaaaaattttatagctggggtgttaattttaatagacaaaccctttactattggggattggattagagttggagatttagaaggaataattgaagaagtaggaattaggagtacaagaattaggacatttgaccaatctttaattacagtggcaaactcttatttattagaaaggcctatagagaattttagcgaaagaacaaaaagaagggttttaattaacattggaataacatatgaaacccctgtagagaaaattgaaaaagcaaaacaaataattaaagaaatattatcctcaaacccaatggttgtaggtccaattagagtgcatttttactcttttggagattggtccttaaatattagggttgaatattatgttaaaaatactaattttgacgaatttttagatactgttgattatataaacaaagagataaaaaggagattcgatttagaagggatagaattcgcttatcccacatatactatatatcaaaaatgatttattattttacaaaatatcattttttaattttatatccaatagaaaaagcctattttgttggaaccgattttaaaatatatgagatagaccataaaactttggatttgttttacaaaactgattggagtttagttaaagagttcgcccaactaagatacaatagcatagaggaatacatatatgaaaatagggactttttatccaaattcaactatgataaagtagttattggttttagcgctggcaaggattcggtttctctagcattagttttagattatttaggaatagattatataccggttttctcccatattccatatatatcggaactattgtatggattttctttagatgttttagagaaattcgatgctaaaataatagaagttgataaaagaaaagttatagatgttttatcaaaaggaccaccttatgttaaatgccccctaagatcattaaaaatgaaagccattaaagattatattagatctttaggcctatcaagaaaacagtttattacaggagaaagaatttatgaatctccaaaaaggtatatggctttgaaaaataaaatacacaaccccatacagtttttaacagatttggaagcgatgttatttgcttaccaacataaagcattatctaatatatattatattaatacaagggcctcttgtgtgccatgtcctagggcctcaacaataatgtggtatttaggattggaaaacctatataaatatgaacctgttggttatgaattgttagaaaaagctttattaatcgattataaaaggaaaaagattggcacagaagagcagtttatttggttgggcttacatagaattaatcctttagaaataaacaaagaactagaaaaaatagagaaactaatggaatatggcaaagaagttccgaaatctagaatatataccatattaaagcaaaccattagacaattaaagcgggcccggcgggattcgaacccgcgacctacggcttagaaggccgccgctctaccaagctgagctacgggcccagagttcaatcggcctctcctttaaaagcttttagatcttttaatgttgcttcctcaactttgtcagcgaaaaattctattttaccagtttttatgtttttcttaagctttccatatactttatatatatggcctatttcccaatcaaaatcgttgaaatatactacaggcaattccctatctaagctagttaaaattgctttcgatactattgtgcctttttgggtttgtttttttggatatttaactatgcaaatcccaacaaattcttgcttttggggttttatctctaaatcgctttctaaaattttataactgtctatatgtaattctaaattgccagttttcttattaattttggttttcccaatagcttctattacagtgttttcaggtaattctttatcggtattccaaataatagctttaatagtaccggtttcgtctcctaaaataataggttggaatttccctttcgaataactaattaatccaaaagatttgagaattttgccctttacttttacatattcccagctttctaattcgccaatttttttctctttcggagtgtttttatacaaaacaccaagtttttttgctactaatagtaaagcccccctacgagatattaaattgttaaaagctttaattttttcttccaccattttttctatttcctctcgagatttgccagttttttctattattagttgtattagttcctcttcatccatttattatttttgtgtactcattaaataatgcgtaatagccataatggtacaaaaccctaaataggtttgccactattatatagccttttagagaataattatacttttttagaactttttcttctatttttttaaatattggtggtatataaacatttcttataacttttatatggggaaaccagtatttaatgtatcgaacatatctttcttttaatattacgggtttctctgtaaaagagctatgccacacatcttcttttggatatacaatagaagaaacattgtatttggcaaaaaaatagaatattcctaaagagttgtaaaaccttattccaggcaatctatcatattcgatgggaatctcgctatagttacctaccacataataataatcgcatttaggcttatctttataataatatatgggtatattaaattgcaatgccaggggtttggctataattagtgaatgtagagaaccaactaatacgcagtgcaaaattttacattccgaatagggatgccaaaccacccaatgcttcttcttctttcttttcctcttttttctcctctttcttttcttctttcttctcttgttctggagctggagctgctacgggggctgctacagtaacttgggaagccttttctaatatttcatcaatgtttactccctctaaagcagcaactacagctttaaccataccttcattaacctcaactccagcagcttctaaaactttttttaagttttcttcgttaatttctttgcctgccttgtgtaaaagcaatgccgcgtatatgtattccattggctttccattaagaacaatttaaaaatggaatgtttataaagggtatattgaagtttcccaatgagatattcagtaagcttagaaaatgtggcaaagctctatgcacataatttgcctatttcaacaaaacatgctgtagagattgcgaaaatgattagatatttgcctttgcaattagcaaaagaaatgttacaaaaagttttagacaaagaattagctgtgcctttctttagatacaatagagatatcccccataggaaaaaaggacaaatccacccatattttaaaataaaacatggtagattcccagaaaatgccacaaaatggatattaaaagaattaaattctgtagaaaagaatgccattaatttgggaatggatcctaacaaattgtttatagtacatattgcagcacacaaaggagttaggggatatacaagcgtttatgggagaagagcaagaagaaaagcaacccatttagaaataatggttgcagaaaataaggattatgatccctctaagaagtacccattaaaagaattaaaaaggatgggccataaattatttttgagcctcaagaaataatttttccactccttttttagttatagtgtatatttctataccataaccagaaaatacatctctcgctatagaggattttaatgccttttccgctaatttaatagcatctctaacagttatatctgggttgtactctgcttctaatgtacctaaagctattactccaccacttccttcggcaaaatagtcttttatctcagatattgctcctataccgtctaagctatagattccaaactctttactatttatgggccctgcaattaacaaacccaatggatttagataaaacctgttttgatataaaagatgcgatagtaaattcgctgcctcaataacattcattgttcttctagaatatagctctcttaactttaattcggtttttagtatctttgctatatgttgcaaatctgctacagttccagagccagccaataaaatataatcagtaataggtataatcttttgcgctcttttgtcttctactatattccccatagatgcttgtttatctgaagctaatactacaccatctcgggcttttatacctataatagtagtcatagagttatcaataataaaaatttaaaggttagggttttttccaactaacctctataaattctattttatcactcactatccctaataacagttttttccttgtggaatgggctaccctatttttagaagcaaactcgtaaaaatcaaatgtttcatctttagatactgggtataaaacccattttgaatgctctctttcggatctctttcctttttttgggataaccccaatatcgtaaaccctaaagtctgcaccgaattttaatgctgttcctaaagtataacctttatctcttaactctttgtaagccttatacctaatcaaaaatctttcatcgtaggttaagcatttttttaagaactcctctttagagagctttttatcatcttcataaacctctaattctcctttatctaataaataatatgcctctatcaaaggtaattctttatcatcaactaaaaccctattgccaaacaaataacctatcatacaaaatttatatggggtttaactgggatttttcttattacttttatagggattgctcctttttcgaattccattttggctatttctatagggctataatttattttctttaatgtctctttatctatttttatcaatattggggccccttgggctatttgcattgccctaattccaataattctagctttctcatatttagaatacatttataatttaaataatcccatttaaatcctttcatgcgctatctatccaaaaaagagatcaaagaattgttaaataaatacaaaatagattggctcaaaccggaaaaaaataaatattacgaaaaggattctataatatactacgaagggaaaccattgtttgttgtaaaagaagaggtttatcccacattagaattaataatagagcattataataagaaaggggaattgctattcccttatgttagagtagacaaaggcgcagtaaaaccaattttaaatggggcagatataatgagaccaggtataaaagagtatagccccttcaaaaaaggcgatatagttatagttatagatgagaacgataatgtattaaccttgggcaaagctctattagatagcacagaattggaaaaaatggacaaaggcaaagctataaagaatttgaaaatttttatttaatgcgcgagctgttagataataggttacaatttaatggagaagcttatataataaaggatagcccattgccctcctatgttaaagaattagaaaaggtgggacataaatatagagtaatattcgatatagaaaaggttatagattatttggaaaatcccccaacatataagaaaaaccaaacatacgttttagattacttttctccaaacatcggcaaacccccacatgttggtaacctaagaagtgccattattgggaacccattaaaaaatatactaaggaaagtaggatacaatgtaatatctattaattggtggggggattttggcacacaatttggagaattaatttacgctttcaaaaccaaaggagatgaaaaagagctaaggaaaaatccaataaagcatttgtttgaattgtatacttggtttaatagagaattggagaaaaaccccgaaataaagaattatgctagagaggaatttaaatatttagaagaggcaatgtataagggaattcaaatagatgttagtcctttttttgaagggaaaccattgtccgagctattaaaaaacaaaaccagagaagaacaaaactatattctatggaaaatattcagagaaataactataaaatatatgcgagagcaattttatccaaaactaaaattagaattcgatgaagagagcggggaatccttctttctaaaaaaagctaaagaagttgcaaaagaactattagaaaaaggggttgcagaggaagacaaaaattctataatcgttagaaccccatatggagtagctctattattgaaaagcgatgggactactttgtatttaactagggatttagctgcggctatagagcattatgaaaaatacaaattcgataaaaaaatctatgtagtagcgaatgagcaatcgcaacattttaatcaattaatttatatagctaagaaagccaattatccttttgctgataaattataccatctaaagtttggtttattattactaaaaacagaggaaggtgtaaaaaagttcagcacaagaaaagggagagctgtttttgctgaagacatattagaaaaagcttacgaattggctaaagaagaaatactaaaaagaaacaaagacaaaccattagaagaaatagagaaaaacgcaaaaataatagggtatggcgcagtcatctatgctatagttagatatgatcctaagaaagatataatatttgattgggacaaaatattatctttaaacgggaaaacatctgtgtttatacaatatagtgcagtaagggccaagcacattttagataaatacaataaacctatagagagacctaacaatttagaaaaagatgaagagagattattactatggcttttctattattatgctgtattagaagaaagcgctagaaaattaaaaccaaacattttagctgaatatctatataatttggccgaagaatttaatagattttacgaaaagaatagagtcatcggctctaatagagaaaaagaaagagtttggttagtaaataaaacttatcaaatattaaaggaagggctaaacctcctaggaatagatgtgccaacttttatgtaaattttgctcccaaatatttggataattctcctaactctatatattttatgttacccctctcaaatttgggttttgcttttaacacctcttttattaatgcctctgggtagcctttagcgttttccaaatttaatcctagttttggtttatcctttaattcttctggtactcctatgtatacttttacattttttaataactctctgccccttgcagttttccttggtaacattcccctaataactctttttaatatattatctggtctctttggatagaaaggccccttataataatcgcccctctttactttttgtagccattcctttttaaccatattgggatccccagtaattatagctttctcggcatttactatttttactctatagcccctttttaggtttctagctactatagaggccaaccttcctaaaactaagccttctgcgtcataaattagttcgcccaaaaattccatttggcatagaataaattttatttataaatatcttcttgggtgctatcgaatttttctatggctaacccagaccataaaggttttttcatttgatatacatcttctgctacagtttgaacccttacagtatagggtaaagtccaacttaattctgggtaactaattccattgatactagcattcatgttagttaatatttgtttgtatatatctcttacagggccttccctttggcctaggctttccaataaggttatttcattaccagcttcaaaaacaaaagtaggactttctatattgaatgttctatccaatacttctttcaaagtttttgggtctttctctaataattctaattggggattgacttgttttaacctttcatatatctcttttatgggcattataccagacccaggagctaaatgggcatcttcttcgcctaaccaaccatctactatatgcaaatgctttattgtttttgaatctattattttttgatattcttttagcaaatcatcaacagtataaccttcgtgtttgcctaataacattgttgtatgtaaattatctaatgtagttcctatatatttttcgctatattcttttaatttggcttcgttatttctaagctctttggctttttctatcatagtttttaatatttcatcagctttttctccatattcagattttaagtatagttttatcctgtctaaagctaatttaaactcttttacatcgggatcatcagaattgccttcataggcttttactaatttatctaaagcgtcttttactttttctctcgattcttttattatttctacgagttctccacttctagaaccgaaaaattctgggaacacattctctatagcgattattggagttttgtcgtatttttctaatcctaaagcttttagtgcttcgctctcagcgaaatttaaagctgctaatttagcaattgtttctgggactttttgcatagtgtattgagataacgtcataaactgttttttctctaatctatcttctaattccttttttatctcttctaatttttcttccaattcctctttaggcaattcaatttgggctttgtttgttagttcaacatatttgcttagccattgctgttgtagctctttctttttattttcgtccttttccttttttatttgttcttctatttgtgatagttcatttctaagtttttctaattcttccctcttttcactaatcatcttttcaattgattcctttatcttttggaaagtaccatttcttagtttgtgtattaaatcggctttatctttatctgacaatggagtactatatattacgctttctaattggttttttaattgttggaatgccaaatctggtttttcaggattttgcgataaagcaactaaagcattaattatggcattatttatttggatttccaggtttctctttagttcttctttatataagcgatttacatctatgttaccttctattttgaaataactctttagatttgcgttttccattattggtctaccattttcatcaacaataacatctactgcgggaactaaagcttcccatgctctaacattgtattttttcttaagccattccttgaattcctcttttttctccaattcatcaaaattatttatattagtgccatgctctttattgtattgttctaacaaatatttctttacagcttcttcatgttctttagagaaaagcctttttgcttcaacagatacatgtgtgtttacagggatatgcctatttgaaggagtagcaaattttctagcagtatctaaagctataaaaagcttagcaattgtttgagccctagtttgttcgttttgtcccgctaattcgactaaaggagcgtgcatcgaagcttttatacctgcagctttagccaaatctgcagcagtatcgaaaacccattttggtatcgcttcccagccgtttcggcccgaccaacttaatacttggacatctgtcctagggaaaccttgccatatttgtttttctatttctttatgtatagccctattaaaagggtttgtagaaacagctatgttcgttttagggataggcaatttataaaaatccttttcattatcaacaatcttcataaaaatttattatactatatttaataagttttgcctatataaacccaatattttgcaggctccccacaataaacacatctctctttttcagcattttcagggtttatatcagtgcctcttacctctgcatgtaacaattcttttatttggttagcacagctttctctcatacagaatggggcttttgctattttgttttgctctatggcttcttttaattcatcgaaagttttaactctaactaccatgtcattaacaaaagatttcgctttttgttttaggtcttcttccatctctttgaatatttggtctatcttttctaactcgtttagagaaattgtgtatttctttttgttgtcccttcttactatggttatactattgttttccacttcttttaagccaatgtctattcttaatggaaccccaatcaaatcataatagtaatatttataccccggggtttttgtatcgtccgaatctaaataaactctatatttgtctttaattaattcataaacttttttagaatactctattacttttgtatcgtctttgcccaaaattggaataataactatttgtattggcgctattttataaggcataaccaatcctaaatcgtcgcctagccaatacaaagcgcctccaaaagctctcatagatatcccataagaggtttgccatacatattttctaaaatcatattcttttagtttttcgtttatttcctctatagaagagattgtatactctttatccccaatttttattgtataggtttttgttaatttacctttttctaattcttcccaaaactcttttggcgcatgaactttgtattcgttaccgtttttgtcttttatataaatgtttggatctccgtattttttataaaagggatgataatccaaaaattttatttcaaatgggatagcgaatttttgccctaacaaatggatagtacctacttgtaaaaacctaccatctggcattattgcatctgcagcataggtttcttctcccccagggaatttgtcccattctggtcttctaacccatatgtagggcaaatacaatacatcccaaaatatataatcataaacctctttggctttagccatatgttctctagcatcttcttcacttctatgtaccgaatgagtttcgttccataaaacctctctccccctaattagagcttttgtagatttggtttcgtatctataaacggtattagtcatataaataattaaaggtaaatccctatagctttcgatccatttggcaaacatataatacatttctgtttcagaagtgggtctaagtatcagtgggtcttctaatttatcgttaccagctctctctatccaaaatacctcttcttcaaaaccttttatatgttcgctctcttttttaaatatagaatatggtataactataggaaaccatgccggctctgcacctatagattctaatttgttttccaataaggacatcaaaaatttgaatgctttatatccatatggcttataaacgggcattccctttacgggataagcgtcatcgataatattggctttccttactatttcgttataccattcctttgggttttcgctttttttaaccatgtttctttatagtctatggttttaaaagtagtagatagctcttatgctattagagcagattttattccaaaggattcggtaacagttaaagaagcaataaaagagatacaaaaattcgataaagaaaaagcctatagcttaattgctttagaacctaaaaaagaatatatagatttggtaaagcaaaatataaaaggggaaaaattatcgaaaacagatattaaattattggctttggctaaacaattaaatgccatattattaaccgatgacactgatatgcaaagtgtggctttaagattgggaataaaagttaaaggctatagaattacaatagaaaaaccgaagaaaaaaagatatagatgtcccaattgtggaaggttttataacaaaccttattgccctatttgtggtcttcgattaaaccaataaagaagtttttactctctctaactctaaatcctaatttttctatttggtctttacattttactcctacggcatagtttttattgtataaaacaacacaatccagatctattaatttttttattagctttattagatcacttagttctaggctatcgctcacttttattatgtattcgccattatttattttctcttgtattagcctaaagtaatcttttaatagagaatcatatttcttttccattgctttccaattatcgaaaaacttctttactgctatgggggtattatcgatatcggttttagttattttggatatttcttttaatattttgtcccttttaatgatttcctttaccgcttggtttccagtagttaagtatattcttatagtattatcgctaatcttttttgatgccaatatttttatatagccaacttgtattgtattatctaaatgggttccagaacatgcttcaacatctaaatcttctatctcaactattcttaatattttctctgggactactcctccttggtatattctaaaaccaaacctcttctctgcttcgtttttaggtaagaaatattttttgatcggtctcatttccattactattttgtttgcttccttttctaatagctctaactcttcgtcagataaattcttataatgggttaaatctattgtagcatattcgtattttttctcagcccccgcttgccaaatgtgttcgccgaacaattttcttgctatccctgtaattatatgaaccgcagtgtggttgcgagatagttgtaaccttctatcaaaatctattaataatacggggttttctattttctttagtttctctatatcatcaactttatgtaaaattactttgcccttctttattacatctataactctaacaaagactatttcttcttttttgtattggtagtctttataatattcataaacatccttataaaatggtatattatatttagaatattggcccgttttgtacaaatatactaaggaatctctatctattatataaccggtatcgtgctcttgtccccccatagttggataaaaaacggttttatcgaatatcgcataatctttctctattcccaatagatttgcttcgcaaaattttaagaaagtatctttccaaaatagaaactctgtaggtttatatttagaaacatcgatgtctatttcttttttatgcttttccgctttagatttttgtctatgtttttctaataattcatagaacttttctggaatatgatcaacaattagatcgggagttatccctttagagatatatagttcaaacaaaacctttgctttttcttcatcgcttaagtttttaattttttcccttgttttttctataaggggtttaaattgcttttcagtttgtttatatttcttatattcctctaatattatttcattgattggtatcatttaaatctaaaaaccatttctttatagcttctattttttgtttaatgtctttgacatcttctttcggtttttcttctttttcctcttttacctcgggttttgcttctttttgttttggggccaaccattggtctaatattggatctaaatagttttttattttttctacccattctttagcagtattatcgtctaatttttctctggcccattccattactattttgttttggtcattttcttgcctaggtattatatatatcgcaacatggggaactctttgccctgcgtaagggccattgggaatataaattgtaacactcggataaatagaaccaattactttggcaaatattactgaagcttctaaaattttatgtaaaatctctctatccaattcccaaataaatgttacatgttgtttgggaataattaatagttggcccggatgtgctggataaatgtctaaaacaacaactaaatcgttatcttcatatattttatatgaagggatttgcccagatgctatagcacaaaataagcattccatttttagtttatggctatcaaaatttatatgttagaaattgtggtattgggagtaggattactatttttagtttggtatttggtttggatttctaataaacaagccgaatggtatatgcgttataataaaatttcgactttttaccaagagctaacattgtatgttttatttattacaattagttattttatttttatacatataccacatatacaaaaatttgttgttggaatgattagcctattggtatctagctatatactaaaaaaagttatcgaatcaatcgcttaattagatatagtaagggcaataccaataacaaataaatccaattgttgtttttctctttcttttcttgttttggaattattatttggccctcttttttatattggtttccgagccagtcttggtaatagattgtataattgtatttacccggttttagattaaaatatgctgtatcataatcattgggatcaatttctccaataaaataggatttatctgctattgtaacataaacaccctttagtttatatggattaggattcccaatggttatttctaaatttttatctaaattagtgctaacaacgattttaggcttttcatttattataacataagagctatactcggttttgtattttttattgtctttctcatactctataacaaattttattggatatttgccataactattagagaatacatcaaaatctattatggcactaccatctaaaaaaggcaaataatatgggttaggcgataccgatatgttagatacagcataaatttttatgttagttattttattgtaagagagcaattttaatgaaattttgcctttcttattaatggtttttggctcgtaataaactaataaatatggcttttcctcagaaagttttagaattttatgaaacgttttgtttatatctattattgatttggctctcaaagttatgtttaaataacaatctttgtcagcatagagtttaatggtatattcgtttttgtttaaaaccaaaggagagctaacatttaagggacatccctctatatataaataaccattccttagatttaggttagagttaatttttatttttatggtattccagccatattttattatattagggctaacatctatagaaattttatccaaggggaaaacaaaaattggtaagtgcaattcttcatcgttcaaatttattataatttcgttataaccctcttttttagctttcccttttagatataaagtgaactcttcgctaggttttaatagttctattgttttagaataatttatttctaatccttcgctacgggcttttacatctaaatctgtataggttttgtttttgtcattcaatatagttatatagaataaaggttcgtccccaatagtaatattggaaggtatcgtttttatcgatttaattaaaaaggcataggcgagcattttataattgtttagttttctttaaatgctctatatatttttcattaatcaaagcggaaagttttgttgtttctacttctaaagctaatgggaatccaatgaatggcttatcattataaaatgggtaagccataaatcttttagcatctttttccatttcatcaataatatttgttgggttaccttgctctattgattctacatatttatataattctttataataggggtaaaccttttgagctatgctttttagtaaagctaattccatatcttttttgttttctctataaaagggtagcctttttattatagatgggtcttttttgtattgttctatgaaatacctattaaagtatttggtgggtattaaataatttggatctgcattaatgttatataaatccaaaaacataaacattccttctaaaaagggaacaagcttttttggataaattttcattagctcgaaaaatgtattagcttctcttaaccttaaagaatactctatttttagtatattgttaaaatctgctggttttagtattgttaaatagccgtatttgtttaacactcttaacagccctatataatccaaatcttttaatttatccaaattgtgtaataatagcgaaccgtattttgtttttatttttgtatagctatagattcgcatgtttccatttttctaatataagcttctcccttctctttagaaattccaatgattcctttctatttttgactatttctttttctatttgggctttttttagtattctttctctttcttctaaagcttttttcaaatattcttctaaaatttgttcttttttctctaatgcctctcttatttttttgaaatatatttttcttgccaagctaactatttctttttctattaaatcactattatctataataattttatacaattttagaaagcaataggtaagctatcactaaaccataaatagcttgtgtttcaggcaatgctgcaaatattagcattttaccaaatagatcaggtttctctgatgtggctgccgcagcagcagatgcggctaggccctgggctattgcagagccaaaagcagctaaccctatagccaatgcagaggctaacgctagatccatttagttaatataaaaaatgttttaagaacctttagttataaaataggctattcctaccattatacctaatgtgactaaaactgatattatttgaaatattggggttagatctatgctaatcccattcgatggggctggtaaaaagtaaattattattaacaatgctgctaatcccaataaaacataaccgacttttttgtctaaccaaacttcgttctctttaacggtattagataaaataacacctactgctgccataccaaataaagcgaaaatgctaaccaaaacgaaatccggtaaatatatttttaacatatgcacagcgcttttagctgcagcaaaaataaaaccaacagacaaactaatcaaagatattctcgccctaacatcgtcattagcaggatcgcctaatattttggttttggctaaaatcgaatacataatagcataaaccaaaataactggtataactacatcaacaaaccctatatttattagataatcaaaagcttgtctaaacattattcatatatttcaactatttctccgaatatttgggcctttccccctgtgggtttggccaatatattaccacatttgtggcattttacaattgttgaagccctatcaaatattatttgctcgttaccgcatttacatcttacttttataaacctagatcttggtttgacaatatagtcattcacttgctttaccatttgttattattgagtaaaattttaaagggttaattttttatcggggatggcccaggttttgataaaaatgcaaataattccagaaagtccagaagtagatttagacaagttattggaaaaggtaaaagaggttataaaagattatggtgaatactataaacatgaagtagagcctttagcttttggattgaaaagtttaatagtttatttcttaattccagaaacatcctttaatgaggagcaatttttagataatattaaacaaatagaagaggtaagcgatgcagaaatattaatggctacgagagcataaatttttaatagatcgttttttatataaaaatggtcgaagttgtattcgaggtttcatgcggtaaaacagttacagacaaaatagaattgcccgacaacatacaagggagagaaaaattcaaatatgggggaaaaatggttaaaatgctttgggatttgtataaaaaagccaattgcaatggagcaaaagttaaaataatcgctaaaggcaagaaaaaagctgaaaaaactatagaaatagaaagcgatttagaccatagaaaaagaataggctatggtggtaaagttgtaagaattgtatgggaattgtatgatttagttaaatagctttaaatgatagtgacaaattcttactaatgcgcaagctattaagcttacccctaataacattttttgtattaggtttatctgtaggggaattggtcccaataggtaaaggtagaggcggaaccactgttactataggaccacaagacataaagctcattggggtatcagcaaatccagagaacaagcctgactatacagctacattaactttgtatattacaatagacgaaaatgtttttagtagtgcaggtacatacaatgtaaaacttaggggaactagtgaaaaggtacaagtaacagttacgggcaaatctccaaacttacaaattagtaatataaatgacaaaaataatgatttggcaacatatatatacaaaaaaataacagaaggtttgccaccaaccaattatgttagggttgaatctcctgctcttgttgggaataagtattatgagattaaggttaaactattgccgtttagttctttgccccctattttatggttggtcacaacatccgaagcggaaagtaggtataatagtatttatagtattagtgccaaagctacagcaaatgtttttacaacttttaacgaacaagcaagcattaaaacgataattgcttcttttagtgaggggatgaacttaatagatatacgttctcaattattttcattaagccttgcgaagtacataacaaactctgttaatgagtgttttataagagcatggaaatccctggggtatgaaccagcagataaactatgcaacagaattaattctgaagcttctgcattattatcgaaatttggaatcaatttggatgctgtttacacatatgacactggtagtgggtcttgcactcttaccaaagatgcaaaagcagacgaagaagtaatgagtgttttagaaggtatgggtttcaaaccctcttataatacaatagaagaaatggtttttcaattaaaaaagggagatagatttatttgctggttggatagcgtatttggagcaatatttgggtcgacttattattcaatcaaaggcttattgccccaaaacattaccaatagagagatggtggcattgattattacattatctttatggggtatgttagcttatcttgttataaaaaggatagggccaagcgaagaaaacaaaaacattggtataaaacatttcataggaggtttagctatatcatatttattattaactttgctaggaaacagcctttcaagtatgtctagtgcacatataattggatcgatactattcttgttctttacctacgaaatagtttcttatatcgtggcactcatctcacatcccagattagaagcaatagtatatttagttctatatggtttatatgtaatcgccctctccgttttcctacgaacgatgggtattgtaggaggagcatccgaaggtgtttttaaccccacgaaagcgatagcgctaagcgccgcaatgccctttagtgatattataggtgggatagcaatacctataatatatcaagcattgttaggcttccaagttgggtggttccaagcgatagggtgggcatggctaataacaaaaattattacttacatagcagacttggtaggaataactttaccaccattcttagatgtgtcaaaaaaactaaaagaaaaacttgacaaagatcttggcacatttgaatggcacaagagagagggcaatgaagtagaaattgcaaagagagttataatgaatatcgcttcacaattaagggatttatggacaaacatacattgtagcactcttggggcgagaaaacttttgggaagaaaatttaatccggtgccattaacgggtgcactattatatgttctcagcgatgaggataataaggctctcatactccaaaaaatacctgatgaggatcaaaagaaaatagttgagaatgttttaaacaacaagttagaggaactggctaagagtctagcgaaagatgataagtttaggtcattactcatgaactactgcaaagatagttgatttttaattatcaaaagctttccaacaaaattcttccagccaatttatagtctttcgcttcaaccaaatcaaagccataaatgttttccaaagaataaattattctcaaataatgatggggcattattcctaggggctctctccacacccctttatcaataaaaacatcgaaatctaaacttacatagggatttttgaatttttttagctcttgtattacattatctaaatcgaaaaacacatcgatagaatcgtaatactttatattatagctatctaaaaactctttctcatctttggcccaattatttataccaaccaaagctattttattaggcttaataataccttcttctattatatacctaacccaagtggcataattcaaatcgccataaaaacaatccggatgcgaatcgaatataattaattccctaggttctaaagcttttattattggataactaattagatggttcccgcctaaagaataaacctttttacctaggcttttaaaatatagaacggtttcatatattttatctaaagcctttggtaatggcatatctaaatctatatcgccatggtcataaactttaggcaacctattccttaatggataatatatttcatcgaaagattctctaatttttttaggtatctctttatagccttttttgtctgatccttcttctaatggaaatccaactaaaactatttctgcttcttccaaagtggaatcgaataatggaacgaacattttagttttaaaccctctattataaaaaataaatggaaaaagatttgtcccctttagggatatatagattttcattagaagatagaaaaggaatagaccctaaaacattagtatatttcataataggtttggttatagccgatataataatatataaattgctatgatcgaagaggcgatacattcttacaataacgctgtattctatataaggtctgcgctattagataaaagaacaaaggatacatttatagaagggttaaagagattggcaaaagcatatgaagaaatatttagagctttgttattgctaaaagatgttgaaccccctaaaaatccatatataatgatggaaaaaaccatagaattatatccggaattaaaagagcattacgaattctataaaaaaataaaagaatggttatccaaagatataaaagctgaaaatgaagggactagcaaatttactatatacataaatggcactaccttatatttaaaagatatgcgcaaactttctaaagatttagaaattttgtttgagcgctttaagagatatttaaatgcaatagaataaatcggtaatgcctatagtagttgataaactaatagaatatttcgaaaaagagttgggtaaaccattaaagaacaaacgctattggataaataaagggaaagagggtgatacggttattagtttgtataaagaaaaaccatttatcttaaaaagagtaaaatttgaggacttttataagtttttgtctataagctctgcgaccaaaatgaacaaatttctatttgtgggcaaagtaatagaaaaaccaacatattatttggttgatgtgaaaggcatattcgtatatggagtaaaaaaagtttaccaatgtttaggaaacccagaattcaaaatagaaggagaatttttaaaatacaaactatatagattagataatagggaatatttctatatagagaaaaacttagaaataatgcttaacaccaatgggttaaccataaaccagggcaaagagttaaaacaaagaataaacatggaagaatatatttatactaaatcgatagacccaagagaggttttttcgataatagatagtataataaaagaatttgaacaaaaagctttgtctttagaatatgcagcattaacaaaaaaagatttggcttttagcattaaaagggaatataacgatttagtttttagagcgtggtattgctctagaaaaagtaacataccaaaaatatgcgaaaaccccttggcttataaaccagaattggtttatgaacaatattaccaagggatgaaaaaattagaaatactattattgcctaaagatatagaaataaaagagaaatgaaagtttttgttcaatacccagaggggctaaaaaataaactattcgaaatagagcaaaaattaagagaaaaaggttataatccaatatttgatgcagaaccaacctatgggttttgtgatttgaaagatgatatagcaatagagttaggttgcgaagctataatacatataggacataactctttcggttttgagcatttgctaaaaaattctaaaatcccaataattatagaggaatatagatacgaaatagatgaagaagctgtaaacgagacattaaaatatatagatgttataaagcataaaaaattgggcatagttagctctttgcaatatttgaattatgtgtattatttgaaggacaaactaaaaggtttcgaaatagttataccaaagaacccccaaatattgggatgcaatgtaattaatgctaaatccatagaaaataaagttgatgcttttttaattccaacagatggcaaattttatagcttgggattagccttacaaacgaacaaaccagtatacgctttcgatctaggattaagaaaaatttatagcttagaaaaagaaaaacagaaatatttaacaataaaatggttttatttatccaaattcgaagaagcaaaaaaagttggtatcttagtttcatggaaaaagggccaactattttataacccatatgaagttaaggaaaaaatagaatcgctagggaaaaaagctattattttagctttcgatgaaatagatcctaacaaaataattggcttagatttagatttttatgttaatttggcctgtccaagaatttttgataattataaaaaatttgacaaacccatattgaattgggtagacatttttaaacattattttgttaaaagctaaatgccagcccatagctgggaaaaaatgctaaaacaaagtgggcataaacatggtaaactattaaaaatattaaaacataataaacctaaagaaagaaaatttggcaaaggcgctaggagatgcgaaaggtgtggtagatacgatggtataataagaaggtatggactatatttatgcaaagactgctttaaagaagtggcacacgaattaggattctttaaatggggagaatagatagcatagacataaaaattttatctattttagaggaaaacgctaggacaaaatttactgatatagctaaaacattaaaccttacagaggcagcaattagaaaaagaataaagaaactggaagaaaaccaaataataaaacgctattctatagatatagactataaaaaattaggatacaacatggcaatcattggcttagacatagatatggattatttcccaaaaataataaaggaattggaaaaaaggaaagagtttttgcatatatattcatctgcaggcgaccatgatataatggttatagcaatatacaaagatttagaggaaatttataattatttgaaaaacttaaaaggagtaaaaagggtttgcccagcaataattatagatcaaattaaataaatattaattcttatcctatattttcttactccaatgtcgcccacaattttataatcataatgttttatttctcttagttggcttgctatatcaattatttcttttactttttgttctatctctttttcatgggcgaaactatataaatggatatactttttagctaaaactaaagcttcaaaaataaaatgctctcccccttttggaaggggcattattattcgatcgaaatattctataccaggcttcagctcttctatcaatttggtattataatattggtttagcaaatcgtaatattcttcattagtataaaccaaatccaattctggtttagcttttaataattcgttaacatattttgttacaatcccctctttgttatgcaaatttcttatatatttccaagctattccaaaatcggctaaaattgtatcgacattaactttgtttagtttagtatttattattccatattttactgcccatggatttaattctatagattttatttgaacttttctatgtttagcaataacaataggatatgggttaacccctgcaaagggtattaaaattttttcattgtccttaactagatctataaactcttttctttctgtgctaagccttggggagaaatagactttatctactcttaatttaaacacacatttgttttctttataggttgtttccaatattggttctccatataatagttttagtttaggcaatcttaattcagtttctaatttgtcagtttttaggtatatggctttaacatatttgtgatgctttaatattttgtttacaattttatctaaatcatcaacagggggataaattatagcgatttctccaataatatcataactcattttttaacgaaaattttaactttatggccttttatattgtattcctcaaccaaatcccattcttcgttttcgctaaattcggcattaactctattctttattaaatcttcgaagcctttataatcgataccttctatttttaactttataggttggtatttctttagttttagctttttcctcgcttcttgtattcttcttatggtttctcttattaggccttcccttattagattgctatctaatttaaagcttaagccgacttctatgtcattaacgataacatcatctattccttctttagtataaactatttcttttacattcaatacttcttttaatatctcttctatctctttaggcaattgcttgcttatatacaattttggtaaaggccatctaattcctattccatgcttgtttcttaaagaattggccatctctattacttttttcattatttctatttcctctaaatattggaactctattttctctggttctggataaggcaatagatgtacgctttcctctttataacctaattcgtctctcattttttgatatagatattcggcactaaatggaattattggggctatggctcttattagtttgtctaagctatactttaatacatacaaaatagtagctgcatcatcttttgatttttctattctttctctattgacttttatatagaacctacttagctctaaccagaattcctctaagggttttggcgctttccatatttgatagttctcgaagtaattaatagtttcttcaatagctttgtttattttgtatataacgtattggtcaacaatgttcaattttttgggttctgggtttacttttagatattctttttgatcgaaatagtattttactatattatatagtatatttaagttggattgtttctcctttattccgtctattcttaatattaaatcttggtaaggcccagtcgcttgtattgtgaatagcctaacagcatctgctccatatttttccattagctctcttgcatatatgaaattgcctaacgatttagacatctttctaccttgttcatccaatacaaaaccgctaacatatacatttttgtatggactttggttagtatataatacgccttctcccaatagagaatagaaccaccctcttatttggtcccagccttctaatataaagtcgaatggataaaatattttataagcctcttcattatcgaatgtggcatagaaagccccaccggagtctagccatacatctaaaacatcgggctctctcttcattggtctcccacatacagggcatttgatttctatattgtctatccatggtttatgcaaatcataagaatacactcttaatatcgtataagaatcgcctccaaacctatatacatagtatttttcttttagtttttgctctaattcgtttgcgtctctatttgttaatattattgcttctttctctttttctattaccgattctacatcatcggtttctataaaatctccaaaatgggtttttatataatctttatctaattctttgtgcttaactattattataaatctttttaatgttaacccagaatacttttctaattcctctttcgaagagataactaaataatgattattttcacatttccagattggcaatggaataccccagaacctttgtcttgaaatggcccaatctcttatattggatagccattgtaacatagctcttttagccttttcaggaacccaattgactttagatgcttcctcaatcattttgtttttgtatgcagttactttccaataccattcctctgtaactctaaatataagcttactcttacatctctcacatacagggtaattatgctttattttgtctttatggaatagtaatccttttttctctaataattctataaatttatcgtcatcttttttggctacccagcctttaaatggctctctaacaaaggaaccatcttctttcaaatcattaaatggaggaacattgtattttagaccgacttcaaaatcttctggcccacaacctggggcagcatgtactaaaccagtaccttcttctaaagagacatattcttcgcttaaccatacggtatgtacatttttgtattgttttttcaattcgtcatatatttctttccattcctcatagaatgggggataatattctaatccctctaagtctttgccttgcacttcttttagtattttgtatttatgtcccaaagttaccaaaactattaatctatctttagctatataaagcttttcgccattctctaactcaactaaaacataagtagcattagggttaaccattactcccaaattgtatggcaaagtccatggagtagtagtccatattaatagataagcatcttcattttttagagggaatttaacaaaaatagaaggatcttccacttctttatatattacttcatagtttggagctaaagctgtttgacatctaggacaccaatgaactacatatttacctttgtataataacccttcttcccaggcttttttaattattttccatattctttctatatagttattatcgtaagtaaaatagggattatcataatctgctaatacccctaaccttttgaaagagcttatttgtttgtttatatttttgtaagcgaattgtctcgcttcttctataaatttgtctaccccatatttaattatatcatccttatttgtaaaaccgtgctctttttctaatttaacctctataggtaaaccatgagtatcaaaaccgggcctaacatatattttataacctctcattagtctatatctgatttcagaatcccttaatgccctaccccaggcatggcccacatgtatatcgtcattagcgaatggtggaccatctaaataagaccatttcttcccacttttcaaagattttgctaatagcctatgcgttaatcctatagatttccaatattctaatatttgcttttctatctctggagaatacatatattgttatatgcataaaattttaaaaaatatgttctatacgaaagatgcccaagccaaagaggaaggtatgtctaaaatgtaaagccatactccccatggatgttgagaaatgcccttactgtgggggcacagagtttacaacagaattcgaagggataataattatagtaaataaagagaaaagcgaagtagctaaagtggctggtattgataaagaaggcaaattcgccattaaaatataatggatccaaagaaaatatctgttttggaaaaacatggtttcaatgtgccgaaaagggttattggaaaaaaagccccattcaaagaatgctcagcaagggtttttggagagatagattttgaaaagctaaaaaattacaaatacaaaatttctaaccataaaccttactttgtttattacctaaaaccttgtaatttggatttcgcagatggttatgtagaaatatacgatgtaacaaataaagatgttattgcctctttaattatagattataagaacaaatattttgaaggggaaaaccaaggctatataagaaggattactagagaaggaataaaagagttttatggacatttcaaaaattatttagagattaatggttttattaaaagcgatttagtttatagagtaataaaagagttaataaagaaaaacatagatgggatcgttgaaattactatacatagacataagcatggagtgtttagaaaaaactatattgcttgggagtttataccacaatagttatagcgttcttaaactttattggatagtttttcgatgtaataattatttttaagtcagctttttcctttaaaaagcagtcccatttcattttataagacaaaggtttcgctttgattaaaccaaacttaatttgatacaatattggaatattatatttgggcttagctttgtaatcattaataattggatcgcccttcctacattctttagagtttaccgaataaactattattttgtgtcccctaaaatagttttttagaaatgccaaaacatccaatatgtattcccagtattctatatttattacagagcttactactgctataactattttagcatgtccttccatatggaatatattagcataaagttttcctttcattgattttttccaatttatataacgggcaggcccatatttatattcttctattccataaaattctaatccctctttggctttaactttcataatagtattgccctttaatatagaggcttttagcaattttatgggatatctcttttttcttaaaggtaatacaaaaaaccttacagggctttcgttaataaaaaacaaagggtttattttatagccatatatcgttgggtttccttcgtaaggagtttttattattttttcctcaaatggatataaacttactaatatattttcgatatgcccattttttgttaaaaactctatcgaaacaactataggcaaaaagctgttttttattttaatagttagtttatcccctcttaaaaattttatcttaattagcttagtatataaaataagcaataaatacaatggcaacaaaaataaaattattgatttatgcaaatagtattctattaaagatgcgatgaaaaattgtaacatcatagtctttcttctggaactttagtatgcaatattgcatcttcaattatttcttcgggtttaacttcaaattctgggtttaggaatattctatgcctaaagcaatccataattagatattttatatcatcagtaataacatattccctattattaagaaaagccaaagtttttgccgcttttattagatatataacccccctaggagaaataccaaaagctacagctttattgttgtttattcttttaaccaaatctaaaatatagtctataacccttctacttaccctaactttagaaatattattctttacaaattcgataaattctaaatttattaccggttttatgttgtctaaagaaaaatatggataattctctattattgcactataatcttttggataacccatttctattttaaacataaatctatctaattgtgctgcaggtaatgggtatacgccttcttcttctattggattttgagtagcaataacaaaaaatggtttaggtaattgaaatgttttcccctctattgttatttgtttttcctgcattgcttctaacaaagcactttgcgtttttggaggagccctatttatttcgtcagctaaaataatattagcgaatattggacctttaatgaactctaattggttattcctgtaaataaaatagccagttatatctgaaggcaataaatccggcacaaattggattcttttgaattgcaaatttatagctttagcaaaagcttttgctaaagtggtttttgctattccaggagggccttctaatagaacatggccttcatttactaaagcgataaacaattttataacaacatcatcatagcctattacagctttgtttatctcttttattaatggggcaagcatttataattcgttatatcattattcaaaaatgcgttgtttgctatgtggaaaagaaaccgataaaactatagaaggtttgtgcttagattgctatataaagaaaaatcctcctttaattaaaattagccctatagtagtttgcaaatattgtggtaaagtaaaagtaggtaaggtgtggaaaaaaatagatataaaaaaattggtaaaagttaagcccccttacaaattagaatccatcgaagatgggatagttttatccttagaaggagagctgttcaaattcgattataatgtgccaataaactatggaatatgtccccaatgtgctagacaacaatccgaatactatgaaaccattttacaattaaggggggaaaatgccattaaagaagcattaaaaattattggtcaaagacaatacagaatatcgaaatatgaagagaaagaagaaggcttagatctatatatggtaagttatagggaagcggaaaagctagtaaaagaactaaaacaaaaaataaatggaataattaagaaaaccttcaaattacatacgagagacaaacaaacatcgaaagatatttatagatcgaccatattgtttagggaagttaagctaaaagaaggacaaactttaatccacaatgggaaaaaatacaaagttctaaaagttagtgacgattatgttattgtgagacatggtaatgaaatagcgcgtattccattaaagaaattaatataaaaacatagttactaataagtaaaaataccctcaaagacttttaaagaaaaaggggtattttcttaatatgaaaaagatgttcgttccattaatggcagcaatgccatttctagcaataggtctagcagcgaatcctgttttgtttaaagccaaagaagtaaaagtagagccccattgtgattttgtagaagaaacaaaaacttatacaataaatggagagaaatatgaggtagaccatgtttgcaaaacaacaaacgaatatgtaacattcacatcggtatggactaacgaagataattgttatttagacgatacccaaggagcagtatgtcaaacagaaaatccaacagaagttagattatacggtttcgtatttgtaacaaaaacagataatggatttaaatgtacagataaaaccggaggaaatgaagcatatggtaaaacagtaagtgaatgtattgccaattacctaaaaggaaacaacaatgtaaatgtagaggtaaaaatagaaaatggaaacactttagtaattgaatataaagctaattatgaaaacccagtagaatttggttacaaagattatttcgtgagatataaccctacaacaaaattcggttatgtattaccagttgttaaagtagaaggcaataccgtatatgtagatccatctgaattccaaacctctaaaaatgctgaaagaatgagagcattattcgaagatgtagcaaatagccaaacaacagtaacacaagaagaaacaaaagaaacaacaacagagacaaccgaaactacagaaacagaaaagaaagaagaaactaaagaagaggaaaccacaacagaagctaaacaaggagaagccacagaagaaaccaaagaacaagccgaaaagacaggagaagaaaaagaaactgaaaaagaaaaaatgggagaaaaagaaaccaaagaaactaaacaagaacaaaccaaacaagaaaccaaacaaggattcccaaccacatacttattagcagctgcagtagtaattgcagcaatagctggagctgtttacttcttcaagcaacaacaacaagagcaataaaattttgattctctattatttaaaactctctatagttatacctttacttctattcctaaactatttaatttctaaatttataggacgatccgtaaaattaataatagattatttgcatattgatgattggcttaaagctaaaaatttaggcaatgctttgtatggaataaaaattgatgaaatcgtaccatttttaactaagctaatagtatttatttttctattgcaatatttatcatgggttaagattaaagagttgcaattattatttatgcttgtctccctctatggaacaataatattttctttgggcctagtattaatagttggtctaatttttggagaaataataaagcaattgatattaaaaaccaacatagatataaaagaaaggcttggagaaaacataaaactatttattgcctctctattcgttgtttcttcaataaatataataagctatttacttgttttcactccatttgaaatagatactagtattgtaaatttggttttctttattctaactctatttttgtttgcgccattattattaagaatagccgtaaaaacctattatggtaggttatgagcctgcagaagacacatttttgttattaaaatgggccaaaaaatttgctaaaggcaaaatattagaaatcggagtaggaagcggttacatattagaaaacctattaaaaaagggcttcgatgcttatggagtagaaatagacaaagatgttttaaaatatttaaaagaaaaatttaaagacagggtttggtatagcgatttatttagcaatgtaaatgacaaatacgatctaataatttttaacccgccttatttaccagaagaaggttgggaagatgaaaaaacaaaactatggaccgtaggaggaaaagaaggcaacgaaataatattaaaatttatagaacaattgccattctatttaaaggaggggggaaaagccataataatagtaagctctctatcaaatccaaataaagtgtttgaaaaaataaaagaattaggaatgaaatacgaaatattggaggaaatgtcattgttttttgaaaggctttacgctgttcttatttataaataatagttttagtatcaaagatgaaaaagttctttgtaacagcagcgttcccatatgtaaatggttatttacatttgggccatctagtaacatacataaaagcagaaattacagcaagatacaagaaaatgaggggttatgatgttttattcccaatgggcttccatgctactggtgccccaatatatgctgcggcatataaagtatctattggggatcctaaacaaatagaaactttaaagaaaatgggaataaaagacatagaaaaattcaaagacccagcttattgggttgagtatttctctaaagcagcaaaagaggatttatctaaattgggctttatgatagaatgggaaagatcttttaccacagtattcaacaaaccattccataaatttgttgaatggcaataccacaggcttagagagaaaggttatatctatagaggggcacacccaattgtatgggatccaaaagttaatatggttattggcgaccacgataggcccgatgattatgctggaataagaccaatagaaggagtaataattaaattctattcaaaagacttagatgcgtatttgccagcatttacattaagaccagaaacagtttttggagtagtaaacatatgggtaaacccagaaaccgaatatgtattagcaaaggtcaaaaaagtattttatgtatacgaattgtatagtctatacaaaaaatttggaaggctcccattaaatatagaaaatagggacaaactagaaaaactaattcaagactataataatctattagataggctaaagcaatatgaaaaaggtatagatttgatagcccacgctgaagagattgcctataaaccaaaagaagaatttgttaaagaattaaaagaattcgctgaaaaagaaggcattaaaatagaagaaaaagatatagaattactatatgaatattacaatacaaaagtagaaacccaagaagaaaaatggatattacccaatactatagtaatagaagagcttaaaaaccaagattttgaaatagaaataataggtaaaatagataaactaataaaaactctcgcagaaaacccagtaacaaaagaattagtcccagtattgccagcaaaatttgtagacccagaggttggaactggcatagtaatgtctgtcccaagccatgctccttatgattatgttggattattagatttgataaaaaccgaactaaaagaattcgctgagcaagctctaaaaaatgttagacctgtagtaaaagtagaaggctttagtgaaatgcctgctaaagatatagttgaatctatgaatataacatcacaagaggaaagagataaattagaaaaagccacacaaagattatattctaaagaattctaccatggggtattaacagaacacgcccaacaattccaaggcttaccagttaaagaagcgaaaatgaaaatagccgaatatctaatggaaaatggttatggttatatctattatacccttcctgtaaggtttaaatccaggtatggaaacaaagttgtagttaaacttgttaaaggccaatggttcattaaatatagcgataaacaatggaaagaattggcccacaaagctgtggaaaatatgaaattctatcccccacaagtaaaagagctaataaaagaaaaaatagattggtatgatgattgggcctttacccatcaaaaagaattaggtactgccctcccatgggatccaaaatgggttatagaatccctctctgattctacaatatacacagcttattatacaatagcccatatattacaacatccagagaaatataatatagactgggataagctaacgatagatgtatttgattatgtattcctaggaaaaggcgatcctaaagaaatagctaaaaaaactggtataagcgaagaaatattaaaagaaatgagaaaccaatttgaatattggtatcctgtagatataaggtttagcgcccaagatttaatagcaaaccatttggtattctatatattccaccatgtagcaattttcccagaaagtaaatggcccagaggtatagcagtttctggcttcgttacagtaaatggagaaaagatgtctaaaagcaagggcaattttattacaattagagaagctatccaaagatatggtagagacgctgtaaggcttgctgcagcatatgctgggaatgctgaattagttgatcaaaatattgatctagaatttatggagaaagccaaaaacgaaataataccaaggatagaaagctatttagatatggaaggctatgatagagatgaaaatagcttagataaatggatagtcaatagaattagattatacttcaaaaaattggaagaatactatgaaaacataagaccaagagatgttattaacgaattcttcaaattagaaaacgatttcaatttctatagagctttagtattagaaaaaccccataagagggcaatagaatatttcaaaaaagcagtaaaagctttatggcctattattccccatgttgttagagaacctgcatggattggtaaagaagagccagacgaaccatggattagggtaggacaatatgtagaccaagtaataaaagatttggctaatacattaaaattggtaagaattagtatggcaagaaatgttagccataggttagcagatttggttaaactatattacgaaggagcaaagctaacagaagaagaaaaggaagaaataagagaatttatcgaatggaaacctgtcaggataaaaataatatacaaaaacccctcagaatttgatatattgagagacataataccatacatagagaaagtttttggagggaaagtagtattagaattggcttccgaatcaaaagaagaaaaagctaagagagccaaagaatttaaaccagccttcgttatagaataaattctttgcttattataatttaaactcccatctctataacacctaatgactaataaggttttttctatactaaaagaatatggtttactcgctggcgataaaaaagttatcgattttttatctcaattggatgaagacgaaattagaaagattctccttaaagtaaagaagaaaaatgtgatggttattaaattggaacacgttaaaatgttcaaagagaccacagaaataacgatagaaaagaaagaaaataaaatctctatatcaaaaaagaacaccacatcgattttacaatttattcaaataaaagaggaatcaaaagagataaaagaaactaaaaaggaagaagaagtagaaataattcatactactaaaaaacccgaagatgtcgatacctctatagagataataaaacctatagaagctaaggcaaaaaaatggacagtccaagattttgttaatttctataaaaacaaattagatttctataaaagattattaaaaggaaggttaaacccaataagcattagaaatgttttaaatctaaaagaaaatacagaagtctctataatagggagggtattcgaaatagtgaaaagggataactacgcttctttagttttagaggatacaactggaagagtaatagtaaaattatttcctgatactccagcatgggaaaaactaaaaatgatggtaccagatgatatagtaggagtgcaaggcatagttggtaaaaacgcctctataatagctaaagatattatttatccggacataccaacaaaacaaataaaaagggcaaatgatgatgtttacgctttgtttattacagatatacatgtaggttccaaatatttcttggaaaaccatttcaagaaattcttggattggctaaacctaaagaaaggcgatatagaaatagcgaaaaaagttaaatatctaataataactggcgatttggttgatggggttggtatctatccagagcaagaaaaagaattagttataacagacatagaagagcaatatgaatatttcgccaaactattaaccgaatatttaaatagagatgatataaaagtaatattaattcccggtaaccacgatgccgttagattggaagaaccccaacccccgataccaagagatatagctaaatccctatatagagaaggtttctatttattacctaatccaagttgggttagaatacataaaaaagatgatttcgaaggtttcgatttattgttataccatggttacgctttcgattggattatatccaataccgaagcagtaatggatggttatttacatccagaaaaagtaatgcaattgttattagtaaaaaggcaactattttcaggccatggctctagcccatatgtaccccaattgcccgatccatttttgatagatatagtaccagatatatttgttacgggccatatacatagagttgggttaggagaatacaaaggcactatattattaaatgctggttgttggcaggaaacaacaccattccaaaaaaaggtgggccatgtcccagatcctggtaaggcgatagcgataaacctaaaaactagggacaaaactatattaaagttctatgaaaactaaagttttataaaccataatattaagacggcgaatgcgtattcctataataaaatatgaaatacctattccagaaaatgtaaaggtttcttacgaaaataacatattaaaagtttctggcccaaaaggagaagtagaaaggaagttctaccacccattaataaagctttctgttaatgacaataaaataattttagagacatactttgcaacaagaagggaaaaaagactaataaatacatggagatcgcatattaaaaatatgttagaaggagtacaaaacccatttgtttataggttaaaagtatgttatacccatttccctatgagagtaaagttagaaggcaataaactaattgttgaaaacttcttaggagaaaaggccccaattataaaagagttaccttatttagataaggtaaaagtaaaaatagagcaaaacaaagatgaaaccgaaatagtagtggaaagccctgataaagagaaagccggtatcgtcgcttctatgatagaacaatctacaaggttcttacataaaaggaaagatagaagaaggtttactgatggtatttggctatactataaagccggtaaaaatatattagaagagtaaatttttaaatcactttttacatagccatcgatgaagatgaagctattcggaagatgggattatgaagatgttactgtagaggatcctggactaagagattatataaatctaaaacccatgttaataccatatagcggaggaaggcatcaaaaacatagatttggcaaagcaaaaataccaataatagaaagattagctggaaggttaatgacttctggccatttagggaaaaaacataaatggactagcgaacaccaaacaggtaaaaaatataatgcttacaaaataataataagaactttcgagattattgaaaaaaggactaaacaaaacccattaaaggtttttgtaaaagcaatagaaaatgctgctccaagggaagaaactactactatagaatatggtggtgctagatatccaaaagctgttgattgttctcctcaaaggagggttgatttggctattagacatatggtttggggagcgttccatggctctaggaaaaagccaatatcaatagaagaagcattggcggaagaaataattaacgcatataacaattctctaaaaagctacgcaataaaaagaaaactcgaaatagagaaaaccgcagaatccgctaggtaatgtatgaactaattttttccccccaatatataaacaaagacaaaaaaatattaatccccctaggttttttcttcgttatactctcttatataatacaaacctatttagacattgatttatttcgatcgagagttagcctatattttattctaacattattaatatctcaaattacgacaaaactatttgaaatgttcgaattcgaggaggaaataaaagaattaaaaataagagattttttagaaatctacatattgctttcgataggtatattattgggctttttagttataccgcaaaatttctctattagcttctctcctacgggtatagagtatatattagttaataacttaaaattagcatacacattttttgttttgtcttttttgtttgggatcggtagcgaattcttattagcgtataatttagatattctggcttatgcaataaaacaaaaaccaatactattaccattagcaatgctagaatttgcaggctttttgttgttttcgctagcagggggtatattgtctataagtattataaggaatagtctaaataaatatattttaatcgatatagcgaaaatactattattcggaacagccattttaattacttcctatataatcgagctttcaatgatatactttttataatgaatgaaagttggtttagagatacatcaacaattagatactaaaaaattgttttgcgaatgtgaatcaaagcttagtgacaatgttagatttaaagtaaaaagatatttacaccctgtagcaggggaatctggagaatatgatatagctactctattcgaaaaagctaagaacaaatactatatttacgaagttacagacaattcttgtttagttgaattggatgaagagcccccccatttagtaaacgaagaagcaattaagatcgctttagatgttgcagaatctctaaatatgaaggtaataccaataatacaagttatgaggaaaaccgtaatagatggttcaaacactactggtttccagagaactatgctaatagccatagatggttatttagagattaaaggtaaaaaaattagaatacaatctttatgcttagaagaagacgcagcaagaaaaatagaagaaaccgataaatatgtggtttataggttagaccgcttagggatccccttattggaaataacaacttacccagatatagatgatcctgaattggctaaaaaagtagcagaaagaataggcctaatattaagactaacagggaaagtaaaaaggggtttaggcacagtgagacaagacctaaatgtttctatagagggaggagaaaaaatagaaataaaaggagtacaaaatttaagagatattcctaaaataatagagctagaagtaaaaagacagcaagacttaaaaaaatggcaagaagaagttaaaaaaagaggtatagatggtttcgaattagtagagctttaggttgccagttatttggtctatcttttcatcttcgtcagggcctaaagcaatacaaattattgtgcctggactaacttgggttttgcctgcatctcttattatagaaacaactatgcctttttccattgcttttttcgctatgtctaataattcttctaagctatttacttttagaactactttctttgctccttctctataccatctatcgaatagctctttattatttctataaacctttagtgctgcatctaaagaagcatgagcaacttgggcgcaaagtttgccttttcctatatctaattttctacaaactattacttgcttaaccataccgctaataaatagttatccaagttcttggcgatttcacagttttctctatattctatcaaaaaggtcttattataagctataatggattttacctcttttttaccacaataagtaaaagaactatcaattaaagaacattcctccaattttttatatatttcgggtttttccatacttggagtacaacaagctatttggtttttatattgggggccgtaaataatataaaaacaagctaaagcgctatttaaattaccaaaattggccatataatatagaaaagccttataacaatcgtattctatatatttttccaaaatattacattctaaagaaccatacttttttaggcaagccaattttatatcgcttaaagtataatcatctaattccaaatctaaaaactttaatttatttaactctttgtttacaaactctttggccaattctttcacatctattgggttaacactacattttagattctttatagcagaaattgtggtttcctctgaagctaaagaaatagcttttatcgattgaaaaattgtatttttagcaacaaacaaagcaataaaaagggataaggctaataaaattaaataatttacgctctcaagcgctctcctcattagtttcctctttttgttctagttttctagctggatgttctggattagctaatggagaaaaaggcacaaactcaattttgtcttcttcctcttttttaaccaaataagatggagcatctactacttcgccgttaaccattatatggccatgtactataaattgcctcgcttgtttcattgttttagctaagcctttccttactaacatggtttgtagccttctttctaaaacatctttaacagtcaaatccaaaacatcatctaattcggcattttcgcttaatactcccaatttcttaagcttagtcaaaaatctttctttttcttcgctaatgtcttggcctgccgcttgtttagcgtttaggtatctagcataagcacgccattttctagcaattgtttcagcaatccataattctctcttattttttaacccatattctttcattaatcttttttcaattattagtctttgcttttgccatggatgagaaggcccttcccattttcttctttgtctccacattggatatggaataaaaatatttttataaatgttctttccaaatacaaatgcgttttgatgggagagactataatgaaataagagatactgaaatgaaaataggagtaatctctaaagcggatggtagcgcatattgtaggactggcaatactattgctatcgcagcagtatatttaaaacctggtagagaacaatccaatttaaaagtaagctataggatgcttcctttcgctggagaagaaaggaaaggcctaggtttaacaagaagagaaatagaacttagctatataatagctaaagctttagagccagcaattatatttgaagaaataccctatttaacaatcgaagcttctgtagaaataattaaagctgatgccggaacaagagtagcagcgataaatgctttgtccttagctttagcccatgcaggaattcctatgaaagctttggttggagccatagcagtaggaaaggttggagaaaaaatagtattagatttgaacaaacaagaagaagactatgattctgaaataataaaaaaggaattgccccaatattacgaatactatggagaaggaaaagctgtcgatatacctatggcaatgtataagaacaaaattacattattgcaattggatggttctatagatagaaaatccttattagaagcaatcaaattaggcaaggatggtataaagagaatgattgatttacaaaaaatagctatagaggattattatttttaatgcctatatattaaaattttgggcccgtagcttagctaggtaaagcgccgggttgcggacccggagatcgcgggttcgaatcccgccgggcccggattatttttcctctatttcaagaagcttctttaatacatcaaacatcttcttctttatatcaggttgttgctgttgttgttgacttgtatcgggaacaggccttgtagctaagtataacaaaccgaccattattccaattggtaatattactgctaagaaagccaatatattttcgtcaattttaaattcggtcggtcctttctgcattgttgggaaattaatccatgcgatgtatattagaattataaaggaaataattccaatgaaagccggcatttttatttcttctttgcgtactatgctactaattaccaagaaagagaaaaacatagccaacaaaatataaaagcttaatccgaaaacatttagaaaagacataaccacattaaagctttcaggacttcttaaatggtataagataaagaaagcaaaaacgaaagatactaaaccagcgtattttcttgctaatttttctttgtctttacccaataacgctcgcatcgtaatgcttaaaaagaaaaatgttacagcaaacactgccataaaggtaactataaaatgtaaagtatgtgtttcctccaaaacattatacatatgtttaaaattgagatattttattatgaattcaattagtttattctcagattcggccatagtttattttgtcgcaatatataatatacctaccatgacacctattggtagtaaaactgctagaaatgctaatatattttcatctattttgaatgatgtttgttcccctcccccaataaaaaagatggcgaaaataactaaagctataatagtgataaatcctagttttacccattcaaatatttctttccatttatcgtctacatctattttttgcatagtttgataaactttcgaaatctctaatataacaataccgaagaacagaacaactaacaaatatataattttgggtccgatgttgaataaccttaatactaaagatttgctagaaacaaaaataaaaccaaccgcaaaggctataactctttttactttttgttctagactgggataagtaatatctaaaaacatataagtaattataaccgctaaaatgaagggtacaataacatcaaaaaatccaatcgtgtctaacaatttaatagtatcgagtgcatcgtattttactgccacatctagtttaattgaaaatatttaaaaatttttaaatatcattatatataatctctggcccccgtagcttagtggcagagcgccgggctgtggcccccgatggggcttttttaaatatggcaaaacctaaattatatgccgtataatcctaaagaaatagaacaatggtataaagagaattacaaatatttttttggagagggggacaaaatattaattattgatactcccccaccttacccagcaccattatggcatataggagcggctttaagttatgctttacaagattttattgcgaggggttttagaaaattgggttataaagtaatatttcctgaaggctttgatgggaatggtataccaatagagatgtatttagaaaaatacgaaaaaatacccttcggctctatagatagagaagaatatataaaaaaatgtagacaaattctagatagttggagagaaaaaatggacaaaatcctaaaagatctattattatctatggattttgagcatagatacaatacagacgatcctgaatatagggctctaactcaaaaaactttcgcagagttatgggagaaaggtttaatatatgaagcggaatatccgataaactattgtccccattgtaaaacagcaattgccgatgcagagatagaaagaaaaatcaaaaaaactaagctagtttatattaaatttaaaataaaagatagcgatgattatattactgtagcaactacgagacccgaattgctaggagcatgtaaagctattattgtacatcccgatgatgaaagatacaaaaaataccataacaaaatagcaattgttccttattacaatagagagatcccgattatacctcataaaatggcagatccaaattttggaactggcgcagtaatgatttgttcctatggagattgggttgatgtccaaatatttagggaattgcaactaaaaccagaaaaaataatagacgaaaatggtaggctaaccatagagcctgttaaggggcttactactaaagaaggcagagaaaaaatgattgaagtattaaaacaattaggagtggtggaaaaaatagaggaaatagagcattctgttccagtccatgaaaggtgtgaaacagaaatagagattattccaatgaaagagttttatttaaagcaattgccattcaaagaggaaataaaaaaattatctaaagagatagaatttattcctgaaaggtataggaaaaacttagagaattggatagattctattacaatagattggcccatctctagaagaagatggtatgcaacagaaattccattatggtattgtcccaaatgtggttatatacatgtagcaaaggatggtaaataccatcaaccttggaaagaagaaatggtttgccccagatgtaatacaaaaatggtcggagaaacaagagtactagatacttggatggattcctctattacaatctattatttaattaaaaaatatagcaaaatactaggaattgatgaagagggattatttaacaattacactttaagaccccaaggctacgaaataattaggacttggctatactatactttattaagagtataccaactaactggcaaaaaagcgttcgattttgttgtaatcaatgggatgggcttagataaacatggtagaaaaatgagtaaaagatatggcaatgtcatagaaccagaaacattgttggaaaaatatggagcagatacattaagatattggtttgcaatggaaatctctattggagaagactatagaattaatgaacaaaagatagctggaataatgaagtttatgaataaggtatggaacatagctaattacatatcgcaataccaatatagagaaacccaaaacttaaagcctacagatgaatggataataaactatgtaaaatatttggaaaacaaagctatagaatatataagaaatttcgagtttaataaattggcaagagagttgtatagatttgtatgggatgtatttgccaaccattatatagagctaaccaagaaaagggccaaaaataatgacgatagcgctatatatgcgttgtattttgttttcgagagagtattaaatatgctatctatattttctccaggaatagctaaatatttagctaaaaaactatataataaagatatagaaaaggaaaaactaaaatactggggcaaagttagattagatctattatacaaaggagaaaaattaatagagtttaacaattatgtatggaaactaaagacttcccaagggaaaaaactaaaagacccaatatctatagaaatacccaaagaattagagattttcaaagaggatttgatattattgcacaacatacagtagtaacggtaattttttatcaaaaaattatgagattaataatgatattgcttttattattaccattagctttgtccgcagtagtttatactaatacccttaacactccttacgggagtttaaactatactatagtcaatggtagcacaatagatttggatggtcaattcgctgtggtagaaactattaatgaaccaactggtttatggtttagactaaattgctctaatggcgatacaaattgtgaaaccgaagtacaaaagaaatataggcttttactaaaattagataacaacccatataattttagcttaaaccaaagctgtttaactccaatagtctttatagagaatacaacatcatataatagtaaagtttttattactaaaccagagcaaggaatatattatgctatatgccccaaaagatatttagatagagttgttgccacaaagagttgtgggtactatatgccattatttactttttgggacataactaatagcactcgcatatcattagaaagtgtaataaacaatagctatgaagaatatccattcgttttttgcgtatacccagcaaaagaccaactaatatttattcccacaacagaagtagttcttacaactttatatccttttgccgatataaatataatactaaaaaatttcgattccaaacccgtaaatgttacccttacatataatacagaccaaaacgctctaaacgcctcttattttatatacaacaataccgcatctaatatagttaatctaactttacctgccgcagaggaagaacctggaaaagtatccattatatttagggtatcctctatagaagcagtaaatggcacaatatatttcaaactttacaaagagaacaacactttagttgatactaaagtattaagagtaaaagtaattactacagagggcaaataccaaaaagctggtgcagaaattaatttagggttatttttatttattatttacttgatatccagagcgctaagaccaaaaatattataagaacaatagtaattggtatccccagaataggagataaaaacatatacattattgccgatacaataaaatagccaaataattttggtttgttctttggttcttctattttttccaaatctttttgtgttaatttttctaaaccttttggggtttgtattaatggggctttaaacaaatagaaaccaattattaggaatactatataaagcaaattcttagccaaaaaatgcacatctatataatataaagacaatgctgcaaacataaaagaaaacaaaatattatctctttttgttaacaaatttaaagtagaaagagcataataataaatcaaaaatagcaaagtaaaagaataaataaaatcatagtaaccagtatgctctaagacattgcgtatttctattaactcgctatatgccataattccctatagaaaaaacttttaaatattaacttaatctgtcactgggcccgtggctcagcctgggagagcgccggccttatatggcggcctctcctaagaaagccggaggtcccgggttcgaatcccggcgggcccacttttaaatctctaaaacccaaacaaaagtggttatagttaaaaaagtaatactaaacaatgtaaaaacccactctaaaagggaattcgattttgaaaaaggcataaacctaatactaggcccaaatggatcgggtaaaaccacattagtcgaatctatatttttagctctatttggaggagatttcgcgagagttatagactattttaaaaaaggagaaaaaactatggctataactttaatattagaggacaaaggcaaaacctatagaataagaaggaaatgggtattagagaataatgctaaattagtagaaagctcgctagaattaattgatactattcctaaaaaattggctagtgatcataataaattgttacaacaaataaaacatttatttggcttagataagaaaataatcccattaatatattataagcaaaatgaaataactaaaataattgaaatggatccgagaaagagaaaagagtggtttgatgaaattctaggaataaaggatttggaagaattctcagaaaaactaaaaatggcaataaaattaataaaaaccgggaaaatttcaagaatagaagataggataaaactattaaaagcagaattaaataaaaaatccttattagagaacaagcttaaaaactataaagaaaaactggttttgctaagcaacgaattagagaatttagaaaaagaatataaaatattggaaaaccagtataaggaatatttagaattgaaagctaaactaaaatctattgaagggcaaataaataacataaatgttaaagaaatagaaagtaaaatcaataatattagagaagaattaaacaatatagaagagctaaccgattatgaaaaagacatactttcaaaaaagcatgaaataattagatgtaacgagataaaaaatagactaaaagagttggaaaaagaaataaaagattacgataaaataaaaaaggaatttttagagatagagtctaaatacaaacaatacgaagagaaaagactagaatatgaaaaagctaagatgttagaaaaggaaaaggaaaaagctaaaagagaatattcttatttactaaaagagaaggaaagtctggaaaaagagattgctgaattacaaaacaaaataaaccaaataaaggaattagaaaagatggaacaagaactattggaaatacaagaaaggattggtgttattaaggctaaactaaaattattagaaaatataaaagataggtgcccattgtgtggggctaaactttctagtgatactattgaacatttgcaaaaagaaagagaaaaattacaaaaggaatactattatttaaaagaaaagtacaaccaattgttaataaaaattagagctttagaaaaatacaaaggattggaaaaagtattagaagcaaaaaccaaacatttagaaactatagaaaataggctaaaagagataaaacctattatagaattggaaatcccaaaaattgaattagacgaatccatcccttacaaatataaacagttattaaataaagtttcttatttagaagcaaaaataaaggaatatgagagatataaaaatatagaatgcccttacgatatagctatcgaagagctaaaaaggatagaagacaaatacaataaatacataaaaaagcctgccttagagagagaactaaaccttttgttaaaagaattagagagatacaatagtttgctaaaagagaaagaagagattttaagtaaattaaacccagaaatagaaacgaaatataaagaattaactaaaaagaaagaaaaccttctatcagagatttccaaagttaaaggcataattaaagagatcgaatcccaaataaaagagatcgaaaagcatgaaagtactattaaacaattagaagagaagaagagaaaatgggaaaaactagttgaaaaactaaatagaatagtgaaagctttaggcagagacggtattcctaaagctctaagagaaggagccataaactatataaatgatatggccaatatttatcttagagagtttaccgacaaatataaactgaaagtgaataacgatttatcaatatatgctatccctatagataatccccattatgagatagaggctaaaaaccttagtgggggagaaaaggttgtgttttctttatctatcgctttagctataattagttggctatcccttcaaaacatgtttatggttttagacgagccaactgcaaatttagacaatgaaagaacattggcattaagaaaaacctttgataaactagaaaaaatggttgaacaagctataatagttacacacaacgaattattagatactggggaaaaccatgttgttagattataaagatgttataaacgaagcaagagtatactttttttatagtactctcatttcctaaaatatatatacatttgttttccctctttaatgtgggagaacccttatctataattatatgaatagttttgttacaatctattttttctgttggaaatttctcgcatttttctaggcaatagaattttagattttctaatggtatatcattataagctaaaacttgcgccatctttatagctaaatcgcttgccacaatagtaaaagccccttttagattagggttaaaatttatgtgtatctcccccttgaaaaagtttctatcaatatttatgttgggacaatccaattcggttaatgggtaatagatagaaaaatagtatttattattgtaataaacatcgtatccccctttagaggggcaaaacttatactctttataatgtatgcaattatctttagataaaaatactaaaactatacctaatagaattaaactaaatagccaaaccttctttcttaagttcttcatatttagagtcatcaatttttaaggcttcccttctttttttatcagataaatctaattttattattgttaacttagagggatggaaagggtattgcctatcagtatctaagcttaaataaaccctataatatttaggatctatatcgattacttggccttcctttcctctaaagttacctctttctactctaacaacatctccaactttaataggaacatttcttattccgagcttttcccttaattctttagacaatggagaacgcatcatctttcttcttctatgcaatggggcattaattatgtatttcctttgctttctgggttgtttagacctaacccagctaggagaccaatcagaaggattataatttcttattttaagcattgggcgttaaaaatatatagtttaaaaattattcttcctttttaatagaaactctcgcaataatcattatatcgcctatggcccttactaaagtatggggtacaattatacccttaccccttaaagcttcttttatttttgggttttctaatctaacttgccacccatatattctggaattgtcttgtattagtgcttcttcaacttttcccaaataaatgccatcttcagtataaacttgtttatcataagcttggctaactctcatatacctttccattaacatagatttaaacaatgatttaaaaaatatagatgttacattttattgacaaatccgtaagacagcatttgggctattttttaagatatctaataaaactctttggcacactattgataatctttttgctagtttatatggtatcgagcaaagatataaggtatttggttttctatctttattatttgggtgtccatgtggtagtaaatattattctctatgaagagttttttaaataattaatataaaatatagcaaatgagatggttgtccctattgctaatacctatagctttgtctttggttattgaaaataatagttgtctaaaaaatggtaaccatactatttatgtcaaatccaaatatttcgatgaaaaaatgaatattagtattggtgataaagagtttagctgcataagatcaaaaatagaagaaaattatgttctatacaaatgtaatataaatataaatttaagcgatgggttgtatgatcttaaaactcccttagagagttatactatatgtatcgataatcaacctcctacaatagaaatagggggccaatacataaatgtttctaataattattgtttctatgatttcaatccaaatataaatgttaaagacaatggttgctgtgagaaaacagatttgtatatctattataatggagagctcgtaaaagaaataaccaaacctggtttctatataataaaagcttctgacaaagctggcaatacaatagagcaaaaactaaacatttgttttccagaaactaataagccaacaataaaattaattgattataaagttggcacaaacataaacgcgacattttatgttaaagacgatagcttaataaaagaggttagctattgtaatattaatccaataaaagagggttatataaattgtagtttaccaaaacaagaaactgtaactatgactgtaacagatatttacaataatagttatagcgaaaccttcgttttcgatattgaaccccccacaataaaaataatagacccaattccaatagataatactatatacctaaacgcttctaaattggaagtaagtttattggtttcgcccgatactaaaaaatgttggttaggcaatcaagaattgcctatagtaaataacattgtaaaagcaatgtttagcgatagcggcgattatactattgtttgtgaagatgaaaaaggaaacaaagctcaaaaaactttacatgttatagttgatacaattcccccagaattaaacataatagattatggctataatgttgatgacaaaggagtttacgcatatattagatatacaataagccccgatgcgtatgtaaaagtatataaaaatggagtatacttacaaaactcttatagtggtataataaaggattataatgtttttgttgggcaaaaatatgtttatactttagagccaatagattatgctaacaacaaaggagaatcaaaagaagtagttatttatataaaaagcgataaaaaatgtaaattggatttcaaaattttgccaaaatataaatatcatttatctaaaaatgtaaaactattaatagaaacggaaccaaaagcttttgttacagtaaccaacaataataatgttgtatgcataggcaatgctaatgaagctggtacgtatttatgtaatgtatctttaacaaatggagaaaacaaaatagttattagctctattgaccctacaggagacaaagctgaaaaaactattgttttatacaaagacgatttaataatatatttgccctctataacatcatttgaagggaaagccttaatagtatatgataacaaaattgaagaagaaagaagttcaataaacttctttggattttatactaacaatgttaaggttgacgtctatgcatcaaacaaattagtttgttctaactaccaaaaaccattatgtgaaaaaagaaataacatatattttatagcgaatacattatcggcattggcaacaaaatacaaaacagaccaaataaaaataaaagcccaatttggcgatttaaatagagagataactgtggatttaaagagagaaagcgtatccctaggaaaatactctatcgctctcggaggggcgctattgccattctttagacaaagcagcgagaacatattattattcgctctaagcgccataatagtatttggaaccgctttagtcgatttaaggagaatatccatagaattacctaaagcaagaatagagtttaaccttatagacaaaatcaaaaatttattatcaaaaattaggaaagacttgaaatgaacctaagaattccttggaaagaagtatattatttgggctataacatgggtaactatataaaaattagtgagcccgaattattgtttgttctaagaaacaaacctcagattaaagatagattaaaattggacgaaaaaactataataaaagaaggagtaaaaaaatataaaaatttttgggaaatttattacaccgtaaaagatttgattttgagaggttatagagttagatttgacgggttttttatagagttatatgaaaaaggtataatccctggaacaatagagcaagattatttggtttatcccgttagtggtgaaataagaatgacttggggagaattattagatatttataataaagcaattgcaagaaaatcaaaatttatgttagcaatagtggatagcgaaggagatgtcacttattacgaattccgaaagctccgttccaataaatagattccttctagtattgtggcaattttatctaaaggcaaacccaaataaaaatatgctgcagcgagaatataaattattcctgtaattctggccaataaattgttatattctagcaaacctaaaccgaaaaagaaaaacgctataacatacaaagataatataacaaaatcccctatgttatatggcactaaataatattggggtaatagcaataacattattgtacctatatacaaccaaaagtttttgtctttcattgctatataaagccatacagctagggctaaactattatttattggtaaaaccaaagacaaaatatctgttatgcctgctaacaaatatagatattgcataaaatttttaaactttgtttctatttataagcgtgaaagctaaagatcttagacaaaagagtgtgcaagagttaaaagaattattggccaaattaagagaggaactaagagtattaaacactttatatataaataaaagaccttttaactatggtaggagaagacaaataaaaagagatatagctaggattttaactgttctaagagaaagaaatgaagcttaagaaaataagcggaggttttgacgagttattagaggaattagaatcgcagatagaacaggaaactagaaaaatcaaagtagtattagatgaaagaaagaagaaaaagagaaccccaagtaaagttactataatttatgggattcctgaggaagaagcagaggaagtagtaaaatatttaaagaaaaaaatagggactggaggaacatacaaaaatggcgctatagagcttaggggagatgttaggaaaaaaattaagccaatccttattgaattgggctatagggaagaccagattgagatagaatagaatcaattatttcgaaactcttctctatggatctatattcgtaatagtcttgtttaataaattctttttccaccaattctgcaaactttaaataggctttatcctcttttgatagagagtcttccccaactattgttgctatgtctctagcttctaagcctttagcatagctttttattaagatatctgcatattttttatgttttttagacataccatttttagctaatctagataggctttttaacaaatctattggaggataaatatttttagaatgcaaatcttgagataaaacatattgcccctctgtaatataaccggttaaatctggcactacatgggttatatcattaccaggcatagttagcataggtattaatgttatagagccctttgatgttaaaccagatctttcatatatagaggctaaatctgtatacaaataagcagggtatcctctcctagaggggatctcttttcttaaggttgaaatctctcttaaagcatcggcataattagtcatatctaacattaaaaccaaaacatctctatttttttcaaaagccagatattctgctaaagttagtgcaactcttggagtgtaaattttttctataggagagctatccgctttagaaataaatatggcgctattcattatagctttggtatttatgaattcgtcgataaacattttatatatatcggaaggcacacctattgctgcaaatataattgttttgtctttagctacatttctagcaatttggagggctagcctttccataggcaaacctgggggggaaaatattgctattttctgcccttttaataatgggtgcgcaacatctattgaggaaatacctgtatacaatatttcgtttggaacctttctagcataggggtttatggctaaaccattaatgtctctataatcctcaggataaggttttggtccttttattggctctccaaatccattgaatatgcccccaatataatcttcgctaacagctattttgtatgtgtttccttgtctattaatttgctttatttctcctgtataatagtcaaacaataaagctaaagctttattttcataagcagcaataactatggctttagtttcttccaaatctattacttctccgagcattgggttttctaattctactgctattagtgggggtttaatggaaggcattttggttatttatagtttggagttaaataattttattgcggggcccaaatagcctctatggcaatatcagaactgtctactattttgttcttattcatgtcaatgaagtagcctggtttgtagtgtattatataataattatgagttgttgttttaaaggatgagtctacaagtactgtggatccagtatcataaattataatatagcaaacctgctttttttggaatacgtaatattatatatttatttgttttacaaacaacactcattatccaaccttcccaatgctcttatagtgttaccattcaacaaagcgggtttcttcgcttttacttttacattgatagatactgctagcaatgcagagattattaacgttaactagtatataataattatagccatcgtttgttattataggggaagcttcttctccatcgcttaatactacgttctcttttggagcttttattattgtatatttattactcccaatagacacgttacaaattagataaggatcgttaactgtagtaggagaacccgaaccaattaatttaacatttcctttattgtctattagcattgcaacccaatttgttgaaatagttatccctctatagttggcgccatcactactagttttacattctattttattaaaacctggaatgaatattatatgtttattatctgtagtgttaaccaaaaatatgtctgctgacgctggttctttatatgtattatgtgcaccatctttgtaataagaagcgctatcatattttccgtatatggcatagttatttccttctttaacgatacaaagtttatcaacaggattacaatcaccagggtttattattttgttgttagatataaatatgttagcctcatacttaaagccaccattagtgtagtcataacaataggcgttcttataggagcatgcatactgtgagggtttttgcttttctacataattgccgccattatctttaattatccatttatctattaaatcgataaatacattatacattttacaacttcctccctcatttgcaacacactgcctgcccgtactgtagtgttgtacttctccatttaaaacagttacatttacataataatatttgctatctgacccagcataaaaagtgctgtattttctataccagttattgttatctatagtgatgggagaaggatggtctatctttatagtctttccagatccagtttttgaaacgtatagttcccatctcttattatttggatcaataatttttgctacagcaacaactttaccaatatttgctccactataagtaaactctgtatcatatagatcgggatcaattccgctatttccccaactagatccagatagtttagaaacttttaaagcacctctgtcgccaatctcgccttcaactatcttatataaagttcccccagtattataataacaagcttccgtagtacataataattctccatcttcaatagagacactttctccataactaatattaacatattctatattattgtcacttttaagttttatagcccgtaccgcacggaaagtattggggactgcatgttccattatcccattaatagagaaagaaaagttatttaacacgggagctataggtgttttcacagcttccctaaatatcaaattccaaaatattggcacattttgttgtttaactattgtaccatctttcatagttacaacctttaatccttcaccattctcattatatatagcataccctgcctttgcaaatggattttcaaatacgcatccaaataagcccataatatctttaatttcgttctcagcttttatttctttattggatacctctatagtaaagcaattagtcttacttttttcaaagtttgggctgctataatagttatacggttgatagcaagcaattctattgccataggcaacaactttattttccatatcgtattccacatatgggtacttacttatatatatcttagaaccatcgtcatataaccatacttttttgttgcctatttccaataatttccatgtatttgctgctaagttaatagaataaactttatattttggagttggtagggattctttttttccacatccatcagataatttgggagttttgctatcacttatagcgaaataaatagtattagaagaatctttaatttttattattctcaagttaggtattccgtttcctaggtttattgatattttttcatatgacccatcgggattgctaatgtttatattacaattaatattattaacttttatagaagtttttccattggttattttgtagcctccattagttgggtatatagttatatatggatctatgtctatagaagttttatcacactcaagctttgccttgttaggaatactcttgtatattattgtataggtttttttatttccattaatttgcatagtaacaaacccttcatgagaatcgcatttgcctttaactaatttatcatcgagtgatagaactcttatatctttaatggttccactactactatctactccattgacatagcagctatatgcataagaagttggagtaactgttactactttattttcagtttctaatttctctcctaacattttacttaatatatctttccatccttccaatagttttttgcaaatattatcgctccaatttatatggatttctccattaaagggtattaagaaggttttcgatggggttgctatgtatataactttctctttagtcttataactttcgttgcaaaatatatctgttatagcataccatctttttattgatagagagatattttcttcattaccaaaaatttctattaagcatttccctatattttccattacattttcactatttgcagagatgctatcaatagcacattcgccctccccctcaatattaacacttgacatctttcctatcaatttttgttgtagtttgctcattattgttggtatggcatttgctgtaacataagcgataatgggtttacatggttctttatttattgtgcagatgtttattctttttatattagagttgggagtgtaaaataataatagggatctcaaaattggaaagaatggcaattggtccaaaaatgcaccagcaacatataaggaattaaaattaaattgattagtgccatttacataattaaaaacatcttttggtaataacccaacaccataactaacattaatttttatgctttttatttcctctatagctttactaatattgtttagcataatattatcgatgtcgatttcattatatcgatttattgcgagcacttgagagaaatctactttatcaccattagcagtttctcctaaaaatggaaatattatattttcatttgttccagaactggaatctataggttcttttttgtattcctttcctgctaaactataaaatagagccttaaactcttttttgaatgtatctaatattaaacctttgtcaaaaacaaattggttattattgtatataaattgataaccatctaatatttccaaaaggtttttactccctttcgctatcttattgcagctatcaacatagaaatatgcatcttcaacaattctttttggttgtaccgttcctgttggggttgatagtaccccaaaaaccgaacttaaagtgtttattatggtatcaacagcttttccaacattttgtatggctttttctaattgtttgctactctctttacatgttttatacctagcatatatagagttaattattaattctactttattgtcaaacaatgttaaataatcatcgaccaacccaattaaatcgtttagcacaagctggtatgttcttaataataactcttcgaactttttatattctgcattaagaatggaagccagattttcgatacccttatttatatattcggtgcttccttttataaattctttgtataggtttattgtattgtccaggtcttttttgagagtactttcttgctcttcaataatttttttgacttcttttactttgcttattaattgttctaactgggcttttttgtctggataagaatctgggtcgattccttctataatagaaagatagcctttaagttttgctaatgctatctgggcattggccgcttttgatagcttagtatcaatacattctaatagaatattgtatgaaactttattagttagtctattgattatcgcttgttcaacagagcttggtattaaagcaatggcttttaatgttttataatctattagttttatttctccaattgtactaggcaataccaaagagttaatagaagaaacaaccgaactaaagtaatttgttaatgatgaggtgacttgcgataaactatacgccaaattatataaagaattggttagtaaagtgtttattataggttctaatttgttatctagactagacaaacccatctctaattgggattttaccatttctcttatgtattttacttcgttagaagaatatatcgacaaaggtgttaggacacttaatgctatataattttgtagctcttgttggtatagtctttccaaatctatattagctgttaaaaacattaatatatcaacctcgcccaagcaatgggatatactattcgatacccaatttttaatgagttcttttttattattgtactggacaaagtcatcaatgtttaattcattaataatttcattaacaatatcattaacaactttgtatgctgcataatgtattaaatagttactaagagtggcataactattatttcgtatattagaaagaagaacgtttctagcatttctagagagaaggttatttctaacatttattataacgctatcacatataggaggaggcattgctttatagcattgatatctagtatgccacatataccatgttacacaattagtaatgccataccataagaaggattggtctatatctccatataaataagccaaaaatttcgatataaaataggccttgtctatattgttttctccaaaatagtaagttgtttggttggcacactcttttaataattgttcataccttggatcatttgggtttgttttagttaattctatacagctctctagagatatattcatatcagacaaaccaattattttttgtatttcatcaatgtttatttgcttatataattcgtgcaatacccttctttttattttaggtaaaactttctttaatgcaggacaagaataattagatatattcaatgattcttttaatgcttttaccgcttcatcgattttttctttaatgaaagttaattgatttatgcctacatgggataactcgttttccagcctttctatatttgttatattggctcttaattctgtaaatgctttaagctttaaggttttcccacttgaagttgcctctaaaataaaccaagcctcgctttctgttatgttccatatgccctttctcgctatatattgggctttaaatatgtttgaatagttgttaggtattaaagaacctatagaaaggtttacgattccattatctggattcgtatcataactaatatttaaaatacctatgatatggggattttcaattctttctccattagcttctaacgatatattgtatactgggtatttaaaggatcttgtcgagatttgagcaatacaattgtttatggttatgtttgtactatacaaagaagcagaagacccatcgaataaagtagcatttacccttaatattatattgttattattaagaagctctgctattgattttgtatctaatataggattaaacatatttatccaattgtctgtagtagtggtagagatatcggagattgtattattctcgcatgtataatttaggtaaaccatgtccttattattgtatttaaatgtgacagtgtagttattctccacatagcttattgatatattaaaagcgctaatatgccaatctagagaagtttttgctgttatattaatagtttctaacttacatggcacaagcaaaccatctttggtatatgttatatcagttatatttgtatcacatttaaatttatctataaacaaagtgcttttcagtttaaccaaatcttcatacaatttgctgctattatctattaattgttgataatttttagatagtttgactaattcttctgttctctttttttcccattctatagatttactaatgcctttcgatacacaatcgatagcgctttctattgctgatacgatgctgtccgttgatgccatggtattcccagcaacagaacaatcaacggatggaatattcccttctatgttaattaatttccctaaagaacccaaattattaagtctttctcttatttttctttgggtttcatttaaataatctcttatttccctaactggggataaaactaaatttgctatcctatattttaatgctaaagccttttgttcgccttgcgatagtatatcacatacactagacaaaaactgtgaaaccccttttaatgggttatttgattctataaaggattctaccaatttagtatttgatacaactcctgattttttcaagaagtttagtaaataatccaaatctttgaatttatcatcttttttcggcaattcacaaaaacttttataggtttgtaatgctatatgttcttcttctcccgtagcagtattttttactttccaaacacaacagccatagctatcggaaatagcaataggaatagaatttagcaataataaacttaatagtagtgtaaaccttgttttcactaatatattggatagatagcttttaatctcttttgtcgctacgacaaagtgaataaaactttaattttccctatgtggctttttaaatatatgctttcactataaatgggccaagttttataaccatttttgtattggtaaccccatacagagccatttagataatgtatttttatataatcgtcataaactaaagcacaaccattgtttgcataccatttattgtctattatatccccagaagtcgcatttataaagtgtgcttctattattgtctctgtattagtgcatacttttttgtaatttcctatatcgaaatataggcatttataacatgtagggcttttacctgtggggacttcttttatctcataataaacataaatagtattattaaggcattggattgtaaagctattattagttaaattgttataaatgctatcccaattaaaattgttattgcttagaaatttgtataaacaatagcgataaaccattttattggcaaaatcgtagctttccaaataggcactatagatatcgttataaatataatgagtatagatcattgaaagcatagtgataaacaaagaagaagagactaatagatcaaaccagttcatggcttaagtattgtagtacaagtgctttctccgaaatcagtttttatttttgcggtaattggtttgttaacttctaaaggcaatactacttttcctgctattgcattatagattttattccctatggttactgggccttggtatgggttaccatcaacatataatgataataccattgtagatttagattgttgtgacagagtacattttatcgttgggggcaatacaaataaagtataagcggtaataccaatcaaaaacattattgatgcatgttttattgtgtctgctatgttaccccctacaacagctgcggccattattgaggaagaaatagcaaaagatattaccatcaaaaaagatagaaatttgaaataagaaacatcaatacccttgcctcctatttttgatactaatacttctgcaaatattggttttattattactgctattgctactaaaattagaaatatcatataaattacgaaaaccttgctttttacttgggatattatatctttatacatttcagaggttttctctatgttttctgctagtaatcttaaagttttaactatatctcccccacttttatatatttctaataatatttcgtttgccctcctaattgcaggactaaaatagaaatatttattaaacctttccatagcttttgggaatggtattccccagctaagccatataactagttttcttaaatatttgtttaatgctccataatctgcattagctgttagctttagagcataaattaatgatataccagaagaaacgctttcggctaaatctcttaaaaatgatgggtacacagattctaaagctttctgttctctagcaatcatatattggtataccatgtaaggagctaagcccaaaactatagatagtgtagctattagaagtatataagatacgtctttgaacaataggtttcctaagaaaaggaatcctaaatataaaactagtatagataataatatacctaagcctatcgctatatattgatattgcctcatattggtaacatagatttaatcataaaagctaatccaatacttactattggtattactaatcctaataataatatatgcatcacctttattgcttcgatatcgccacccatacctcccataataaggcttaatattatcataaaaaatcctccgactattaccaaggttagatacatctctactaccatcattaatagatctccaaattgttggactttccttcttaattccctactatatagatcggacattctatatagatattcacttaagtctcccccgctttctagtatagtttttaagcctattaatagttcggcccattgttttgaaggactatatttggcttttttgtctaatgcccttaataagtcttgcccaagcacatctaccatttctactatatcttttgcctcttgtcttatttctccgaaatctggcatcctagagagaaacctaaatatagctattggaggcgccccggtattggctattgtagccatgtatagagtggcataaggtaggtttttttcgatagaagcttttctttggggtattcttatagaagggtatatggtataaaaaagcaaaatcaaatgaaatattattaaaaacaagattattgtgattagtattattattgtggtattttgcaaaatagatattttaaataggtttgctaaaaaacaaattaatatgccaattaatatagaagtgggcaaagcaattaataatccaacagttaccgcttgggcagcatattcatagctagttaaaggaatagccgctttttttaagtctttgtctaaatctttgaatagagtataatatagatcaaccaaaaaacctaaatattttatgccaatctcgtataacacagtttagattttggcattgctataataataaaaaggactaccttatagtttatattcgttacccccttttaggtagccatatcctattattctccatctcccatttattttgccagctaaaactattctatcattttcatttaatactaatggtttggacaattttagatacaatctatctttttttgactctatcactaatgctgggcttattatggataaacccccaaccagaagtttgtctccttttttaggagggttaaccttttcttctgtgccaacagctttttcgaataaagagtattctatttctattttatcccacattggaggtaatttatcggggtaaccaactacttggcctgccaaattatcttctctagttaaaaaaggatctaaagttgtgcctatagctaatgtgcctctaggtaaagcagtatcaacaaaatagttaccttgtctaatagaagttatttctgtataaataggttgccatttgttttctatctttataccaggcctaatctctatttcgtcccccacttttagtttaccctgtttgagagaaccacctaagacacctccaactaatttttttggatctgttcctggtttgtttacatcaaaacttctcgctacaaccatcaatgggtctttgttttcctcttttttgggtaatggtatttttgtcaaataatataacaaagcatcgatatttacattatgtatagcagatataggaattatataggtatctattagtttttttatttcttcgtaattttttattgcctgttctttagttactaaatcgattttgttttgagcaacaatgaaatgctttattcccattatctctgcagcttttagatgttctattgtttgaggcataatcccttcgttagcagcaactactaatactgctgcatctactaatgctgctccagaaagcattaccattattaaactttcatgccccggagcatcaactaaagagattttccttatttcttcacaaccttcacatggttgagtagtataagcttcatatccctcttttgttgggtctttatatatagaaaaatctatataacccaacctaattgttatacctttttgttgctcttctttataagtgtcgagccattttccagttaatgctttagctaaagtggttttaccatggtctacatgtcctatgaatattatagacaaatcaggatatattttcatttattaagtgaaagctattggtttataaaatttttcagcttttcttttagcattaaatattgcttagtatattctattagctcttttacagtattagcatttgcaattttttcttttaattcttttagttgctctatatacaaataggggctttcctccccttctaacaaatatagtatttctaatatttgataatcctcgtctttattttctatttttacactatctaaaataatgtcgatcttcgctattaggtattgctttattaattcaatagctttcctttttaattcaatattattgggatttttcattaattcattagctataaatctaagttgggttataatagagctaagcctttcttttgggcttatatatttagaaaaataatctttagcccactctattagggattgtttattgccataacaactattgataatttcgttttttataaaatctttgttatctgttttcaaactggctaaccaatagactattttttcataatcgttagtttctataacctttttggcaatatcttttggatcaaataaattaaggttaaactctaaaggtaataaagcgaaagccaattcaaaattaccttcattaatggcttttttgatacaatctaatttaaagaaatctttatattttaatagtaattgcttaacattttcatcaattattggctctatcgtaaaataaggcattaacttttgcaatatttggtttgtgtttatttctgttttttgtgttttttgttctggttgggctttgttaattatttgtcttaagtatttcaaaaatgctatgaaattttcttcatttggatttgtttttagtttgttaaacaaggtctctaattggttagcttcattagataaaccttgtttaattaattcttgttttattaaaggcatatagctttccaagtttttaactaccattggaatatattgtttgatttgttctttttgcgattgtggaagtttatcccacatttgtaagaattggtcaaattgtgttatcgcttgttttacatctatattagttatagggaaagcaaaagctgtagagaccagcaataaggataggaaaacttttttcatgctatatctatagaatagtttttataaatatgagccgccggcgggattcgaacccgcgacctgcggcttacgaggccgccgctctaccactaagctacggcggcttatgcttataaaacaaatatttaaatttttatcgctaaactatttgtgatagttgatgcaataatgtatctaaaacaacagggtttttatgtcctaatagtgggaatattcgtttatgctattacggattatgttttgtctaaaattatgaaagataacccagcgaaagggttaatatccttatctgcagctttaatagttattacttttggcaaatttatagaattagtagagcaattagtagcttggtatattagttttatagtaatagtatttttgtttttagtcgctgtcgccacagttgggggggaagattggttaaaaaaattggaagaatttgcaaaaactgacaaaaactttaaccaagctatacttggggtaggtatattaatatttatattcgctgctgcgagagtattctctgaatctttgtttggtccatccgatatagagaatattacagatccaacggcattggccatggcagtaattagaaatcctaacatattagcagtatttgcatttttctttgctttggtaggagcagtttttgttgttaacggtatacaacctaaccaaaagagataatgttcgagcaatattggaacaaaaaatttagaaaatataaatttcctggcttaaaaactaaagcagcaaaacaattaaaaaaagattatgatttgttgtttaattttatattaaaaacaaaagatttcgttttggccttatataatagttataactttttatccgaatataattctaaaattattggtttaaccaatacccatgataaattaatcgaattagataaaaagttagagggattaatcggggaaggagaggctttaatagataattggttgcaaaactcaaacccctcttatatagagatgtcttttaaacaagaaattggaagctgggaacaaattttaatatattacaaaaatttagccaactattatataaaagaagagcgcaatcttaataaccaatcattaaataatttgaaaaggctgagaaattcgataaaaaaattattagatatcattacaaacgaatataaacatttagtaaagcttggttttattgacaaatcttttttagctagttgggactattatagaaaagcactattgcccgactattacatggccaaatatatagaaattaaaattggaatattaaacaaaataaatttcaaaaaagctgtcaaatccaattattacgagataccaacattgttaggccaatatttagccacattaatagagtatttggtcgctaaaagtacaaaccataaaaattacatatcacaaaaagccatagaagttgaaacctttaagaatagttataaaactataaaggaaataatgggaagacaaagaaacataattaaaatcgcaaaaaacatttgttattcaaaaatgaatagtacagagataattttaaaagagaatgccgatgcgttaactaaagcgaaggaaagactaataatgaaacaggcttttactcaattatatcaattgttaactgaagtggaaaggtatatggattacatagaggaaaatattcctgattatactaataaattcctagaatgggcaaacaaagctgttttatattatgaccaatatgtagaaaggctaacagagacaagagattatataagtgttaaaatagagaagcttttagaaaaattggctcaatagacataagctattaatactcccccaattttttgttcttttgcttccctatttgtgattaaacctttagaggtagataagataagcctaccaaagtttaatgctggtaaatatcttttttcgtatttttccaattcactatactctactggaaaccttggtttgattgcatttgcttcattgaaatattcacttaactctatttcaattattttaccgcgagaactatcaacaagtctataattttttatatagccttctcttttcattatctctactaattttattattagattagatactgggaaaaatgctgttttgtcttctccttttcttcttacattagttaaatgagataggaaatctgcaactatatcgcgtgccattggttttggttgacaaagaattttaaaaatctgttaatgtttgtcatcattaatcagaagcgtaatccctcttcatttatatatcttaataaaaatttttaaatagattcgatcaaaatttataaatggttttaaaaaagaaagaaaaattagtttgccccaattgtgggagtgaaaatataatttacgatcctaaaaccggggagtatatttgtaaagactgtgggtatgttatcaaaatagaattcgatttaggcccagaatggaggcattttgatgatgaaactgttgatagaaggagaggaggagcaccattaagttatgccaaagtcggtaggggtctttctacagaaattggagatacctcggaaatatataaattgaaaggggaattaaaacaaaaattcatgagaatgagaaaatggcattctagagtggcgttgtccgcgatagatagaaatctaaagatagctttgcatgaattgaaaaagatggttgataaattaaatatgcccaaatatgttgaagaagaagccgctagaatctatcaaaaagttgtagaaaaaggtttggcgagggggagaaatataaatactttattagctggtacattatatttagttataagagaatataacattccaagaactttagaagaattggaaaaagccacaggtatatctaaaaaagatatagctaaagcctatagattaatagttagagaactaggcattaaaccaaaaccaattagtccagctgattttgtttatagatatgcaagcgaacttaatttacccccagaagtgactgctacagcaatagaaattatcgaagaagctaaaaagaaaaatattgtttccgggagaggccctcaaggtattgctgccgcagcattatatattgctgcgatcaaacatggaaaatatgtaccattaaagaaaataggggaaattgccaaagttacagaagttactataaaaaataggtacaaagaaataattaatagcttaggaatcgctgaagaaatagagaaaaaaagattgcaattagaaaactatgggattgaggattaaggccataattgaaatagataaagaattaccaatttttgagcaagaagatgaatggagagctatctatagagtaaaacacgaaaatggaaaaaccataatagagatagatgctaaagattctgtagcttttagagcaatagttaatgaattggcccgatattttattgcgactgagaaggttgactctctctccaaattttaatacctctcggggttaaaataacccaatcatctgttgttactgcaatgtctcccccaatggcatctacagttttcttcatcttttctaatgtgtgttttaatgcttctctacttttgttttttagagaagatatattaacaaaacaaatatagataccttcccttaaatcgtccaaaatatatctaatttcggcgaaatcccttggtctatatactttaacatacaaagaaggttctatttcctcgattgtttctgttaattcaatataaccctcttcattgggctcttccatatgctcttcaattttacttattctcttcaaaatctttaataccatacatttaattttgttggttatttaaattttttatgtttattgtacatcctattggagttatcgatttttgatatgttatagaagcattaataaataatggtattatcgcataagcctttaggttttgcaaagaaatttttattttgtttaaccccattttttgtatatttatcccattcccttctattgcaagtttagcttctcttatattaataagcgcatttggatcggtaaagacaaattccagttctccattattatacacttcccagcttttcggtttaacataatattgcaaatacggctttacatctatatggacaaaatcgaaatcctttgtttttactaaaatgggcagtatttctttataataagcgctatactttattaaaaaagttatcgaataagaaccaggttttggatctttatttttagtaaagctaattgcccatttgttttcctttttttctacatttattgtataatattcggacaaccctgtatgttcaactgatacttctttcacaaaaaatgggtcttccacattaacagtcaaatttatatcgaattttgtatcggtaatattaacttctttaggcccatcgcattgggctatcaaattaactattagtggttttatttcctcggtttttttcgtagtatagataggtttatattcatagtattcccctgtcgctaaagctttccattcttctataccgctagaaacaaagctaacataatcatcaatgatagagctaattttttccctagtattaggatctataaacaaatagccagcaaaaagcgctattgctattaataaagctaatgccccatacactttaaaataaaaaccgaacaaaaaataaagctatttatttactttctagtaacactattattaatttaattgtttgattccctaaactttaatgcctattgttgttagcaatgaagaagttaatgttagcccaaagcaaaagaaaatagtaatactaatgaaaaaaacattatatttggataaacccgaatacaaagcgtttgttgaagaattaagaaatttatatgctaaaggcctttttgatgatatattgattataagggaagatgaagacactttgtttaaactatatgaaaacgagtatgttgttgcatctttaaaagatttagaatatttaaaacaaaaggtaaacgccttagcgaaaacgatggttgaacaaaaggaaagtacgaacaaatttataaactatttgaaagatgaattgttttccattaaaggcaaaataatgtattttgaagacgaactaataaagcaaagagataccattaacgaattaaaaaaggtaaccaaaactataatcgatatggtaagaaaactatttgaaaaccaaaaattgttatctcttaaagcgcaattgaagcaataaatttaaattatttataattgtagtcaaatgaacaaaagcgatatagttattttagcttttttctttgtttctttgggtttaggaatattaacattgctaccagcgaataccgttaaagaaacaacaaaaaaccaaaccgaattaaaagtatcaaaattaaaattgctaaatgtaactattgccaaaaataattattttagtattaatggggtggcagtaaacgaattagaaaggaagggcgaagtaacgcctatattatttaaggtttataattctagcaaaggcactgtatatatagataccgattcctataaagaaatctctttccaaaaatctattgctatagcaaaagaatttgtaaaatattttgttagaactaatttggataataaagatatcttaataaaattaaaagtggatagccccttcgtcgctggcgaaagtgccggtttaccattaactttaggattaatattcgcagcaaaagggtatgttccccaaaatttagataaatatgtttttactggagtgataatgccttttggtattattggagaggtaggaggaatagatttgaaatatttagctgcaactcaaaagggcaaaacattagtccatgggcaatcaacatttttagggggattatattatacggatgttctttccttatatagggatttgtttggaatagaattaatagagaaaaaacctattaaaataccaaggtggtatttagatataacaaagcaattggccgatgatttatgcaaaaaagctatagagcatggtttcaaagattcaaaagaatataaagtatatgaaaaagcttataaaaataaagattattatgctgctgcatcattatgtttcaaatatttatacgataatgttccaatagatacagatgtttattctttaatactagaaaccaggaaagagttaaacgatgcgataaaaaaggccaaaacattgtatgatgccgaagcaataggcgctgcgagggaaaggcttagaattgtaatagaattgtataacaaatatttggatactggtaataaagaattcttatacaaagcatattggcgtttgcaaacagtaaaaggttggttaaaatttgttggcaatactaccggtataaaaaattactgccctaaagaagtggtaaatgaaataaacaaaatttactctgctttcattggagaaaccgttgaaataccaaatagcatagattgctattatttggctaaagagtatatatctaatttgcactatagattatttagctatccatccaatgtttttgctttaataaaaatagcgccttattatttcgataggttcgatttggttggatattcctattaccaattaagcaaataccttaatgaggacaaactattatatataataaaagcgatagacttttcccacaattatttaacaaacaattcataaaattcgtattttaattgggattcgaaacccaaattttccccattgggcaaatctatattattggttacaactatattgtttaaggcacaattatatttgggccctatcctagtttgagtttctaatattagttcgcccattttcattgttgggttaaaacaaacataaaacaaaggtttaaccaaaattttttgcttctgtaaatctattttatactcttcttccggttgtatcgaagtattatataagttttgctctatgtctaagcaatatagatagtatgtacctctcttcgctgaaaaagttatattattgttagaataattgtaaaataccggtttaaaatgggaatcaaataataaaacagaagtgcaatttaaagcgctaatattaatagagatgtttttttccacatttactggaatcgtataggggtaatattttttataataagccggtaccccattggcgtaaatggaattaacccattttgggaaaaaggcaaaaaaagcagttggtttaagctctttaacataataatacagaactattgctttttcataatcataaaaatttggattaaactctttcttatccaatgttatatgataatgcattggcttatacaatgcaaaaaacattagtatagcaaataccaattctaatagcaatagcataaattgttaggataaattgatttatatacgccgccggggggattcgaacccccgcccccttatcggggattcggtctccagccgaaccccttggtccgctcgggcacggcggcaaaaacatactaataaaccatttaaaaatttataccgcttttaatatgccaggtttaatctcaaatactgccccgctagtttttagatagtataacaattgctctatctcactatccataagaccatattccttggctttttctattaactctttctcgctaacaccttccccgctatctaattgctttattagttgtaatagcaatttttgtttttctattttgcttcttggtttaccactctctaatattgttatgtctattactttggattctgggtctactcctgcttcctctaagaaacgcttggttaactctatagccaaatcggcatcttctttttcaactatatcggaaaaccttattctagcagatgcctcagctagccttacaatggattctaattgccttgtagagattggaactgcttttaactcttgagatttctctctgagagagacaaagaaatccttaattctagctatagcctcattggaaagcctaggttttatgttttttctcacatataggatatactttcttaacaaatcaacaggtattgccaaatctacatcttcaacataactttctaataccctttctgccaattgttcatcataatcttttccaggtttatctcttattagaaatattaaatcgaacctatttagtatagttggaggaatagctatttgttctactaaagacaaattatcatcccaccttccaaatttgggatttgctgcggctaaaacagatgtttctgttttcaatgtaacatgtataccggctttgctaatggttacactaccttgctccattgcttcgtgtaaaatcattagctcgtttttacctagtttctctatttcgtctaaagctaataaaccgccattagctaaaaccattggccctgcatcgatagaccatactttcaatagttcgtcccttactactaccgctactaaaccaacagctgtagcagaagtgcctgagacatatctacctcttggcgctacttctgcagcatattttaatagagtgctcttcgctgtaccgggatctcctactaataatatatgtatatgccctctaacttttgtgccgtcccttctaatttttttaacacccccaaccatttgtaaaaggatagcttttttaatgtaatcataaccaaatatagaaggggcaaaattctccaccaataaatctaatgggttattgctattggctatctcttttatttctaccaaatctttgttagtgataactatatctgttatgtttttctctaaaaattctatgttgtttacttctattagtatatcatagatagcgcctttctctgtaagctttgcggtccttggtattcctactattctaactctcgctccaggaacagttttatcattaattttcggttcaactagtttgtcctttaatatggcagtaaccctctcgggttgggctcccccagtaaggttttctggtaattcctctaaaactaatctttgtatatcaatgtattcttcttctactatctcccaatcgccagatttattacatttgggacatttctttggcttagaaattttatcgctaatactttttatctctttttctacttcgtaaccacagctatgtctaaaaacggccctttttagtactggtttaaccattgaagattgttttataatgccttctatagcaactaatttattcaaatggtggcttcttagctctctaatctttacatttctataatattgtacatcagtaaacgctatatagtaatctactttagttaaagcatattcttcttggatttcttttactattgtttttatttgctctattgctttttcagggttatccaatatttcatctattaggtttattagccccaactcttctaactcttttagtgatatatatagtatatcgtttgcttcattcatttttttcaatagatatttttctaattctagcttctcaagttcttccacttcagtggtaatgttatatagaattataaaggttttagcaaaaacaatatatgaaaatggacaaactaaaatacaaagttttagacactataaaaagatattctcttttttcccccaacgaaaaattgttattagccatctctggaggcaaagattcggtaactttgttagacatactttataatttaaattacaaattcgatctatattttattgatttaggaataaagggtttttctgatatttctgagaaaatagttgagagtttatcaaaagaatatgggttaaacctatatatagatagggtagcagattatgggattactataaagcctataggcaaaatgccagcttgcgctgtatgtggaatagtaaagagataccttatgaataagtttgcatatgaaaaggattatactttgattacagcgcataattttgatgatatcatagcttttgctttagctaatctgttttctggtaattatgaatatttgttaaaaataagacccaaaaatgaaagatattataaattggctaaaaaggttaaacctttgttttttgtaagagaaaaagaaaccttgcaatatgttaaggaaaagaatttgccatatgtaaatatagaatgtcctttaaggagaaagaatacccaagatagatacaaaaatatagctaatgaatttgagaaaatattccctgggtttaagaaaaattttataaaagctttgctatactataatactagagtgccagagccaaagccaaagaattattgcaaaatatgtggttacccatcaaagggagaagtatgctctttttgtaggataagaaatgcattgtcaagacataataaataaaattataataaatagaattataagggaattgttattacctaaattagacggttttagcataataagtttatcgaaatacgattttatcgatttatttttgttgagcgctttaaagaatgggcgatattatgtatataacaaagagatcgatttaaaattcccatataaattggttaaagccaacaaaacatacaaagtttacaaaattatcccaaccaatacgaaggtttattttattaaaaaatctatatttgatgttagacccaaagaaaaagcagatttggctattgttatagagcagaactataataaaaaattgcacaatagaataaaacaattggctaaacatttaattttgtacgatatagtttatgataaaaagaaatgtataaaaataggtataaagaacataatatttgaaaatttatactgctgttacaaaaatagaaaaaccctagttagcctcgtcgggttttatgaattgtaattgtttagacaaataaatacccaactcttttttcaattgccttcggtatttgccatatttatcctcggggctaaactttggaggtttgtttattattgttttggaaccacacttagggcatttatcttgcaaagtatatatattacatttggggcaatactttatatgtttcatttgttagctaaacaaagacatttttagcatttcatataggccttggaataaggttatagtaattattactataatggaatatatagcaaaagctatggctaaatttttcacaataactattttttcgcttattgggtcttttgaattttctatactattaagcaaaatagatagaattattactgatgctataacatataacccaactaaagcttggtacataaaaggatttattgtctctttctttatcataaacatttgcaaaacatccaaaggaatagaaaattgaccagcacttttaaaatcgaatgatttcattatgttggtaattaaaagcataatagatatcataaagttacctataccaacgattatgcccaacattactgggattagcattattatttgcatcttcatctcgctaatagcttcgctaagcaaatccttagttctctctaaagcagcgttaacctttctaagatagtctaacaaagaatctaataattctgataaagatgttaaacctttattatagttggctataataatatcgaatattgtctctattataggattgttgtatttttttaatgcttcttttactgcaatatccaatggtttattctcattgattttgttttctatattatataatagctcagctatttctaagccttgcaatttttttgatgttaagcttaatgccctttctaagctataacctaaagagacataactttttagtgtttccaaaaatattattaattggttaaccatttttttaattttgttgtaaagagaataaatatcaataaaatacaatgcaaacccaattagcaaaaacaaaactaacaaaaatgtgtaagctaaagaaacaatactattaaacattttgtattctttataatggctcgatgcgttaagaaatattattaaccataagaaaaacaatggaactaatattaataaccgatattgcctttttccgggattataactaaatatggtgggaggaacctttttctctataacaaatttagatagtattagcaatatggttggcaaaactatatcataaaatatgaacaaataaatgtaaggcacttccgatgcaagaattccgattattactggtaataaagtcatggtcattatcggtaatactatacctatcatatttattatttcgacagaactctttagctctcggctaaaagatagcattctatagtagctttgctccaaataataggataatgcctctttcgggtttttgtttattaggatgaacaatgcttgagttattgttgtgttttctttccatctttttgcataaaactctagggcgtcactaatagattcgaaataccttaagttggtataccataatagcctttctatgtccaattttatagggaaaggcaaatgcttcgcactattatatattgctaaatcaatactaggcaaaacttcataaaacattgctacattaagcaaaaacaaaagaaattgtgtttcttttttggttctatagcttttaccaacaataattggataataataaacatacaaagccaaaaacaaaaatattaaagtcaaaaaaatgaagtttatattgaataaagaaacaatcgcagaaaccattgcgagcaatataaaaaacaaagaagcttttccaacattgtttggatctatttctaagcccaattcccatgcataaaattttattttttctttctctttttcattaaggaaagaaggtagaggcaaataagacaaaaaatttgtaatgtaataataaattttggcatgccatggaatcactatattggtaataactcatatttataaattattatatttcccaaaactatgattcgatacgagttcaaaaccccgaatcttttggaggttttgattttgcttacaataatagttatatcatattggtttattagctaccaatcaacagtaaataacataatcacaagcgcagtaggtaatgaagtaactacttaccttaagattataatcaataaccaactatctcaaaccatattattatggtttattctattaacaacattattcaatagcctaatcctagaaggcataagagacaaattataatttttaaatcgaagttttattagttctagccccggtggtgtagcggcctagcatgcgggcctgtcgagcccgcgacccgggttcaaatcccggccggggcggttttttcattcttaagaatgagaaaaaatagtggacccgccgggattcgaacccggggcctccgccgtgccagggcggcgtcctaccgctggactacgggcccggtataacattaattatcggtttaaaaacctttagggggatatattttatagaaaccaaatcttttatgctatctgtgggtttgttgactaatatactataaatggtaccatcaaaaccggcattgtcattctttatattatatatttctttccatccgaattcggttttttctatgttaaagccattttctattaatttttgtgcatgctctaataaaagttttactgcttccataggagtaaggtctctaaatgcataaataaacaaatacaagtttttccattttattgcgtgtatatctttgttatgcccatagtatattacattactattgaggagttgctctagtgcgttcttgaagtagtactttaccactttcatacaataataataacatgttataatataaagcatttaatgcaaaatttactattttattatgtatccctatttcggagacgaaattgggtatatatatagattcgataaaaatattgctaaaaacctctatttgctaaaacctatagtttatgatggagaaacataccaagcaccaatagaatataaaatgggtgtaatactattgcctgacaaatataaaggtttgatgctagaaatagaaccaatagaagataagtttgtaacataccatattggcactaaacctttcttacaattataccaggctaaacccctattcgtgcctaagaaagatgaatacaaattacacaaagtgccatggttagtcattcgggggctaaaaaagttaaaagcttttaaataatgaagcatattttttattatgccagcaaaaagagacaggggtatcccattagcagcagtcgagagaatattaaaggaggaagcaaaaaaggtcggagtaacaagagtatccgacaaagcagttaggttattgaaagagaaattagaacaaatctatgcagagatcgccaaagaggctttaaaattagcaacacacgctaaaagaaaaacaatcaaaaaagaagatgttttaaatgcagcaaaggtagtagttaaaaatttagtctaaaatctttattagcttttttctatttttaaacccctttattattttaacttttctaccgaaatacttttccaacaaatatattagctctttgttcgcttcattatttcttggaggactcttaagataaactttcaatgggttgccctcaattattttttgatttttactatttgggaataccaatatttctactatcatagcgaatattgtattaccaatttaaacgggccgtgggggattcgaacccccgacctgcgggtccgaagcccgccgctctacctggctgagctaacggcccagctaattgttttgatgctatttataaatgatgaaagtttatctaaaaatggatcctttaattatggcaggtatagcattaattatagcatggttaatactacaatggtctgaacccttaataaaatatttattattattgattttatttgttttggtttatgactttatagttaatggagacacatctactgcggctttcttaacttcctttataagtaaaacagtaaacaaagccgttgttatattgcaaaacctgtcaaagaccaatagtacagaaataataaataatctaaccaataccactcctatattgttattgattaggaaaaaataaacattttagtattttgtccctatagcttacgcaaacatattttcctatacatcccaattcattaacatcaattacagctttattttttatgccatctaaataagtcccacaaattggtatagtattgttagtaacaaaaacgaaaatgtttttcatattggttttcccgtacatcgattccaatattaaattgttattttctagttttattgatagaaatgggatagaataataggattgtcttatttctaacatttggggtattataatttggttaactgctatagtaaaggtaaaaactattaaccccaacaataatgggtatgtaaaatactccatcgtttatactattatatctctttataggggtattgttgtttcttctttctgcggagccatgctattaatattaagaataatgccgttcctattattataatggcaaaggaattgaactccctttttgttttctttatgggtttcgcttttggtttttcgtttttgctttgttctatttctgttttttgtattctagtataaggtaaaaacgtttcgaaaactaatttattattttttattaccatcacatggccttcttttatttgggctttcccaatataggttttgttgtcattaacaataatccccccttctatggttaaaccattgtttatataaattttaacgccttctacctctatatatggttttttattggctgcgtaaaatatataggcaaaccttgtattgaatataggttttattttagattttaaagttttgtcccatgtaaacaagggggtatccaatttagaacaattaagtttttgtggtttaatatagatagggatataattattatcgcatttagctagcatagggatagaaatattgttctctaaatcgaaagctataaaaacatctttgggcaaaaatatataactattgttgtaaaaatataatattgcatcgctgtctaaatctataattttgtatacattggaagtattgcctattggtataggataattaatattaaactcccccacatattggttgtttgcataaacttcgtatcggcctttcgataaatacaatttatttccaattatatagaaaggaaatattttgctattcgcctcttctatatagctaaaaccatccaaatgtagtttaaattgtccctttattttgaaatagatgtctttattatatacagtaatgtaattatctgtattcccaattatggtattgtttgccttttttatatctaaagtccaggactgaggtttaatatatataggcctatccaaatatattatgtctcttttggtaaaatatttctttatgtaacctttattatatatagcagtaaagaatgttggtattacaaatttgtattcccctactactatggaatcatttacaatataaaatccaggtttggtttttatcccaatatataaggttttgttgaaatagaatattttgttatttattatcctgctttctccttcccttaatgttatatcgggtttgaaatcgttgttagtatctatatataaattatcatctattctaatgtttggttttcccatataccagcccttgtctaagttaaaactgtacatcgttggtatatctaaattaatctctctttttatagaagtgcaaacgcttttacatgcagtaactattaggtttacttttctaattaattttatagaataatttccaaaaggaacttggtctttttttgggattggatcgaattttttatattgcaaaggatttatgttacatgctatattatttgtctccccataacatagccatttaactttatacaaatagggtttttcataatataatttattgtatattcctaacccatttaggtagttttctaacaatttttctcccaatagcgatttattatagaataccccgtattttatgctaatgtttttgtattctatttttccaggtattgttattaaaacatcgccgttttctatttttactggaatcggaaaagtattattctctattattccaacataaattagtttaccattgtggtataccttagcaaagaaaggatctgattttattgtaactttattcccctttattgtgtaattaaagttaaccaagtaggttggtatcacttttattttgccttttatttttccattaagttttaactctattgcaggcacatcgtattgataataatcgaaatatcttatttgctttccatcatataatattgtgtgcttgtaataacctaaaatatgtataatatttaggccttttatcaaataagggctaacatcaattttcgaccattctttggatacatttacctttaactttttgttatttactataacaaaaatggtatctttgtgagaagctttcaaatacaaataatgcccatcgaatttgtattctattcttggcttttcatagtaataataaggtataaccttatggccatctttgtatttgatctcaataaggtttaatccaattcttggagtaaattttatagtactatttcctttgactatataagtttcgttattgatttttatttctatagggtatggctgattagtaatgatttgtaaagtattgttctctattttagttataaccttttgaggtaaatagttaaacctaaagcaataattttctacacatagtttaccatctttgtattcgccgaaaggtaatatggtagtataattattgctttgaatttgcaattcttttattccatattcgttaattcctttgtatacgaaaactttaatcgtatcatttacatagcttagaagctggctatctatagggattagtttatataaattatcgccatcgcaataaaaagtttggttaaacataaattgattgcaatccccatatggaattgctaaatataaggaaccattcaaatctttgggtttattaacaaatattattggaatactaaatgttttttcaaaattgtcctttcttatttttatttctataggggttttagttggggtatattcgatagaataagacccatttaaatctattgttctatagtatattccatctatatagatatcgatgtttttgccttgtcctataatgaatatattggttttttcgccctttcttatattgtcgggatcaacatataccgcttttatgtttaatgggtctttttctacataaacttctttactatatttatatacaagtttgtttcctatgtaggctttaacatctattgttgtatttccatagaatgggaattgcaaattaaattcgtaggatttatttacaaatttacaatcatcttcaacacaaacttttaatggaatgtcgctttctacttttattttgcaattggattggtagcatttttctatagatacatcgattttaggtttaagcaatttattaaaatctaaatatagtatgccttttccatagagatacgcgggctttttaggatttacgatccaatctatatttatttcgtccaatgttagattaaaatattgcattaacaaagctattgctcctgctgttacagctgcggcgtaaccaggatagaaaccaaaatcaaatttagattgggccgataaagtggggttttggcccagcaaagtaggaccttgtgcggttaaaaccttgtatccatctaaaccaacaacacatattttagcaaaacaaggagattggagagtataattataatcttcgttatctaaatataatacatctgaataagtagggctttgatgttcgataatttttagtttccaagcataattggtatttattgttagatttatcgttttctttttgccatcgtaatagcagggctcatcaatatacatggattgtatcctacaagttattgctttctcctttgggctttctatagaataacaacaatttgtagggaatagaacactaacatcttttgcgctaactatttggattgttgcattgtataatgccacatctgttccatattttgctgtatctacgtttatttttatattactataaccctttccaggggttccatgtatagcgaatcctgcagaggcaattgttgggaatttagataaaaatttacatattttatcagaacaatcatcgaagggggtattgtaatttaatgtgactacaactaaatcatatttcgataaatttaatttagttacatctaacattttattagaataatcgcaatcgtatatgtctaatgagacatttggggcgatactttttattattgctgcactatatgtgccccaattatttatatctactttatcgcttcctaagcaatagaatagtcttatattttcgtcgtttaaattatattggctttttaatttttcataaagcgaatggttaaaacctgtagttattaaagcgatttttatgttttgtccatttgcatcttttggaacatttattattatgctatctaatggaggtatcaagctcttttctttggagatgtatcttttttaactatgttctctatatatgggctataatcttttagctctagggctattactttatcattatattctaatattttatcgaacaattcctctctagttaatgctaaaactatttcccctaaatctataggcatagaaattaaacctttttctttgagagtttcaatatttttatcataaaatattaaaagtaacattgttaaattaaaagaggttgtttaaaaatcgatgggctctaaaaataaagacctaatcgctactgtggcgtaggaacccttttctagatagaatttagttaaccatttttggtttttctttattttcaaatcatacatcttttgaaagccctttctataagtgccaacaacttttttattttttagcatctcaatagtaatgccttctttatctaataaataatctattatttcttttatttcgcctttggcattaactttatacccaattaatggaatctctatgttttcataatagtctgcaaaatagaattccaataaatctcttattttgattatttttgttttgttttttagatacatcttaagggtttcattaaatatataagattggtacgaatgtataaataacattaaaatccattttgggatagctttgaacgctttacaatagtcttttttctcaataaaggattgcaaataggctttttctatatctagggcttttggcattaatggaataactttctttagcttttctatattattccaatattcttttattaattgcctaacttttattgtttttttactttcttttccaacaaatgttaataaaattttagcagcttcctcgcattcgttttttattaaatgtttgcctattagatggtttactaatcttttgtctccaaatctttggacatcaaaatagtttggaaaaacatcaaacccctttggggattctgcataaacttttatttcaaaataattccctaaatgggaacccaattttactggtttatcgctaagccctatatagtataattctaaattatctaaaaacatagattttttgggccctttatatatagaaatcaattgataagttatagcttttttgtccttttccccagaaaaggatattctatatttagacaaacgaaattgttttgctattatctttattgcttgagttgttgataaatttttctttttcaaaacataaatagtataatccccaggaattccattatcttttattcccataaatttgaattgatcataatatttcgatggttccgctatagaaaaattagttttttcaataacaacaaaatcctcaggcttttccttaattcgcattaaaagaatttagggcaaatagacatacccattagaacttctaaccttgcctctctttatcatctttgttaggattgcttttactattctttcttcttttcctgtttccttagctacttcctttactagctcgtcttttaacattttgcctctctcctttaggatttctaaaattttttcgctaatccttgtcataattaatataatagtttctctttaaaagtattaattgtcttaaaagagtttttctccataaacaaaggcattatactcggggttaaatatataagctgtaatgtcttttattctaaatcccacatcataattattaagtttggcaaacccattagcgtttttaactaagtacttcgctaggaaataagcatttgttattttattgtttagttttatttgatttaacccgaaggttggtttttctaccaaatccacatctaaaaattggaccgaattcccaataactatagttggtttgttaaaatctatgttaaaatattttttctcaatggggggaaaagagctaactattattttatcgaattcgtctaaatctattttatttatttgtttataattaatgattgtgcctttggtttggtaatatataggcataacatattcgtagaaagacaaaatattgtctgtcatatctattattagggttttgtttccttccaattttagatcttttttggggcaatgctttttatattgctcaatatgataatcctctataacaatatctgcagtgtattcatcgataacttttattttatatcggtctataacaattttccctttaaaatatggttggtatagaactaagctttcatattctccgccctcgccaactaaattaatatactgggctttttctattacttcgaaaaggtttttaccgacccattctttttttagtccataagaagaaaccctgctaatgattatttcaaagcatctctcttttaattggtttaagtataatttatatggagttaaccaagaggggctatgtacatatatatttaattcataagctattttatttatattgcctgcttggtatgcagaagcgatagcccctgtaataatggctttgggcttttccatctctagtatttcttttaatttagagaacttctcttcctcttttacgaaatataagtctaatggtaaatctaatagctctgcttgagttttggttatctctatggctgggtaatgatacatagagctaaaagcattatctggtttgatggatatgagttttctaattttataaccatggtctaaagctttaactaaagcataattagaatctttacccccgctatacaatacaatcatttaggtttttttagaacacaataaaaaaatggttcaaacccataatgtatatggggatatatccttttgcaatattgcatttcttttggaaattcatggttttcaaaacttgttaatgctggctctccaaataggttggcattaactatcttaaaccctaaagagagagcatattctattacgaattcattttccaggggctctaatgtgcatgtggaataaactaaaataccatttggttttaacatttcataggccttttttattaattgtttttgtatagtttgtctatttataaaatcctctatggtttttgaaatgaaggttttatctatatagggattggctgaacaaggcgcatctaataaaatttttttaaattcctctttaaatggtaattttaaagcatcttcattaattattactgctcttacatttagcctatcaaaaataaatcgcatctttttagccctaaaagggtctttctctacactatacaaaatagattgattgttagttaattgttgtattaaagaggattttcccccgggagcggcagccatatctaatataatatctttttttcttggagacaaagcgaaaactggcaaagctgaagagggattttggatatatattagacctaaaatgtattcgggtaatgcttgtaaatgaaatggggctttttttattttatagaaatattttaatggcgtactctctaactcgaaacctctattttctagcatttttactataaattcttcatctccccttagagtgttaaccctaataaataagggcctcttttggtttaatagtctaagaaaatcattatatttaggaataaacttatagcggtcgagcattaatgcttataaataaaggtttaaaaaagcgtgaatgaaagatagaattatctatagaagaacccctggaggaagggttactgttttatataaaagaaggaaaccttccccagcaaaatgtgctatatgtgggagaccattacaaggagtagtaagagaaccagcttattggttaaaaagtgaaccaaagcaaagaaaaaaagtatctagaaaatttgggggttatttgtgccacgaatgtgctagaagagttatagcgagaatggcaagaaattttgaactataaagcaaaaaactatagataataccattaatatcacaacaattaaggatttccttactaatgtgtttttaataaaggaaggcaatacatcttttgtaaaagccaaaaaggacatttctcttattataggtattttggattgaacaaaaattataaacaaagctattagcgttactatataagaagtaagcagtataataaagggaggacaaaaactaaagtgtattcctttataaaacaaataaagttttgccaatttaactataaaggaaacaataaaaaccacgaaagccaaataaaacattaaatatattttcttaaaaagcttaggaaaatcaaagatagattgctttcctaaaacaatatctattataaaaaataaaagcattaggaaagaagtgaagaaagttataacaaagctaatcatttttgtccaaaggctctaactttaaaagatacacatagtcttttttggccaattgaaataatactgatttagatatacctattttatattttagcgcttcctccaaagggacatattttatttctaatactctaaatttgtgcgatactttcttctttttgtcgtagaattcaataatatcgttaactgctaagtttttgggaatttgatttctaacctcgtattccttttctccttttaatagtttgtctaaccattttttctttattgttagcctatgtatcatagggaacaaatcacttttcttaaaaggtctaagtgttatggctattctagggttaccaatataaacatcggggctattcttttgggcatacccttttaataataaaacttcatgcttaggcatatatttaatatcgccatcccaataaacataaaaatatttgtattttgattggcttatatttttaataaactcttctttcgtttgcgatttttggtctttggttactattaaagtgtattgcccattagtgtaataaataaaatcgcctactctttctatagagttttgggcaaactctatagcttttttccataattctatagggtttacatcctttttctttaatagccttttctttattttttctttagcatgtttagttagcaggaacattaataatagtataaaccttgggctttttgctctctatccaatctagaaccaggttcattaattcttggtctaccatttacttttctaattgttatacccatgtttttcaaaaacaagtttagcccttcttttataggtaaaggtttatttgctttcccatatttcgatggctctccttcaaaaaccattatcgaatcgcttatgtattccataaacattagatcgtggtctataacgaaagcggccttgcctttttctttaattatatttcttattgctctagctattctaaccctttcttctatatctaaaaatgctgttggctcgtcaattaaatacaaatctgcttctttgagtaaagcggcagcggttataactttttgtaattcccctccgcttaatgtggttaaatcgtggtcgaacaattcatataattctaaaggccttattaatagagaatcataaaattcgtttctataattgggattcatttgttcgaacaattttctaacagtaacttctttaggctctatatattgaggtttgtagctaatggttatttttttctctatgggcttaacatcaaaatctccttttaatgctctaataaatgtggtttttcctataccatttgggccaacaatacctattatttcttttttgtatacctctcctttttccgcttctaatttgaaattgcccaaatctattgtaaatggtttccattctaaatatatggttttgcccctttctttttcagtgccttctaagaaatataattcgaaatctctaattcttatattttcgctttttaaatagcctttaaggtattcatttatagcagtattattacctttgggttggctaaattttccataagccgctttttgaccataagctatatgtattaactctactatatagtccaatataagcaaatcatgatctataacgattttagttttatttagggcttttattttaagagctaccctaagcctttctctaatgtctaagaaattcgttggctcatcaaaaatatatacatcgccttctttagataaagaggcataaatcaatagtttttgcagttctcccccgctaaggttttctatttttctgtctaatattttgtctaagccgaattctttcaataacgggttatccaattttattagctctctaacggttttacccttaaaaacctctctaagtttttgtatttcttgtattttatgtataacctttatttgccctttagataacaattcaaaatagttttgcaattctgtacctttgaatttttctattatctcttcccagctatattctttattataatcgccgaaatttggttttagttgcccactcaatatttttatagctgtagtttttcctattccattgggccctaaaattcctatagatttgcccatctttactattggcaaggaaaacaacctaaaagagttaggcccatattgaaatacgacttcgcccttcgcttctgggacattaattatttttatggctttgaatgggcattttttaacacataacccacatccaatacaaatagattcatcgattacaggtttgccatcgattatttctatacatttctttcctgccctatttaaagggcaaaaattgtagcattcgtagttacatttgttaggcttacatttagttctatctattatggcaatacgcatttggatcaaaaatggatagctataaaaaaggtgttactcttattattcactcgtagttacttaaccttataaaaggtttggccaaaatatattatgaaaactctagcaaaagcccaagtagttttagcaagcggtatgttattggctggagcagtagcccaaaacgaccaaacacaaaacaacacagaaaccttaaagagctttgtaaacaaaatggttcaagatttgtctaaagtaagaattgttattagcgacgctccaactgtagaggaagcaatggctgctacagatgttgcattagttttatattacaaagctgtagaagtatctaaacaagaaaaagaagtaacttatgaagtaaaaagcaaaaaagtagtagttgaatatccaaaaacagtatccgaaaatgaggtacccttatacaaagctacagagaaaattgaattaggagaaggtttaactggaggtggtgtatattccatctctaacgaattagtattcaaagatggaaaaataaaagacaaagacaatgtagaatattattacacagttagattcaaaccttcttctaacgcaatagtagtgtttaaagacaaacaagacacagaggaagaagatcctactgtattaatagatggaggtagtaatgaattctatacaatagaagtaacatttactccaagcttaccaagtgatacagatactttagaggataaagaattaaatcaaaaagcaatggagatagcaggcaagaagttctatatctctgaagtaggagacaagaaaattgtattgagagaagcaagcaatgtagtaacattaaatgttggtgaatcttacgagtttgaaggtaaaaaagttgaattggtagatgtagtaaaacaaggggacgagtattatgctgtgattaaagtaggggatgaccaagaaacaataaaagttaatgacgaagaaaaagtaggtggagttgatgtaaaagtattgggcgcatgggtatctgaaacacaagaagggaaagcttatgcaaaagttatattaggagggaagaaaatagaattacaagaaggaaacaaagtaaaagttggtggcgaagacatagataatacagaagttataaaagcaggaccatctggatttaagataaaggtatatgtaaacaaagacgatacaacaaagaactacttagaaaatggaaaagaattagtagacccagtatttggcacatttaaattagtattcaaaccagtagacttggtagcaggaaaagaaaaagtaaaagtatacgcatctggagaagatgcatatataaaactaccattagtagaaggagaaaaaacattcaaaatagtagacggtattgatgatagtaataatttagtaattaatgaagattggtatgtttcaattggggaatcccccgacgctaatagtttcaacaagttattaacagtactagggggagtttctggcgacttaagagttaatatatattataaggatagtaacggtgtaaagaaaccatactttgtagtatcattgccaacaagcagagaaacatatgtataccaagttaactctgtaacagtggataacgataataacattgcaaaagtagagttaaaagatgttgtaactggaaacacatttactgtaaatgttgacttgaatactggctatacaacattaaccataggtggagtcgactttgaactacatgttagcactgatagtagcaaaactgttgtatacttagacaaagtggttgtaataccatctctattattctacacaaaggatggccataaagtatatatatggaagaaagatagcaatgtatatacaatagtaagcgaattccaaggaaacgacgtgtacacttttgctggagaggtagagttatatccagatacaaacgataagaaagtggctgtaagcttccctaggcaagaccaaaacttaaaactagagggactagaaccattcatattagttaaagctgaatggggtaatgatgttgcatacaacacatctaatggtgataatacagttactgcaaacttaactatcgttgatgtattacattggtatgaaaaatcactcaataatgtacaactaacagtaactgcccaatctggaaatgatacagcacaaggttatgtatattataacacaagcgatgggctaagcttcaaaatcacagtaactgcaacacttccagataaccccgatgacaacgcaagcgaaaatgttgttaatgatggtgcaacccttaacgttaaggtaacagaggaagatagcgtattaaatgataaaatggtaagaaacttcgtttcactagaggacaacgaattcaaaggattagatcaatggggcacatatatccatggagacgaagagaaggacggcgatggttatgtagaattctatgtaccaaacgaaaaagtatggtacgacataagagtagccaaaactggggaaaccaaagaagaatatcaaacaatggaattgacaccaggtgaaaagatagacaatacacaatacaaagtgaaagatgtacaagcagatgtagaaataaacccaaccaaatactacgaatacaaagtaaaaccagtatatggattagtagtagcagatgtagaagcagttagcggttgccaagtagccggtgcagaatacgcaatagcaataggtacaccaacagacaacatgttagtagcaaactgtgttaaagaagaattaatgccaggacaagcattagttaaactattagcagacaagaaagtagtagtaatgacaggtaagaccccagcattagcagccaaagcagcagaagagtttgctaaaaaagtaatgaacgatgaagtaccagaaaaagcagagatggtagtaacacaagaaggaacagtagcaagccaataaaattttagagaatagataagataatttttactatatctggataacctttctctgcttcttcttttattttctctcttactaggtctttcttatctaatagttcttttaatttcttttttacaatctctcttaatatttgccttaattgataaggggttaaattgtattccattgctactctatcaaatagctctattagctcttggttctctgaatataaccaaaagtatcttcttcccattcctctccccattcctttccttctaccgaacccataaccacctatgcccatcatggtaccgaaagtaccaatgggtaatttaaaagctttaactatataggtttcgcccaaagaatgtacaaagaaataatagcctatcttaagcttaaatatggaaaagtaaaaccccaatctgttattggtaaaataatagctaaaaaccccgagttaaaagctaaaataaaagagctaatccctataatagagcaagagataaaagaggtagaacaaatggatatagaacaaataaaagaattagctaaagcttatgaacaaaccatagagaaaaaagaaaaagacatagagataccggtaaaagacaaagtaataacaagatttgctccaaacccctcggggttattacatataggccatgcaagagctatagttctaaaccattatattgcaaaaaaatataatggccaattcatattaagaatagaagataccgatccagatgtaaaaaaacctatgattgaggcttacgagttaataccgaaagatgtggaatggttaatacaagaaaagcccgacaaaatagttgtacaaagtgatagattagatatttactataaatatatagaagagcttataaaacaaggcaaagcatatgtttgtttatgtaaagctgaggaatttagagaatatagaaacaaaggtttaccttgcccccataggaatcaatctatagaagaaaacctagagttatggagcaaaatgttaaaaggcgaattcaaaaaaggagaagcggtagtaagattaaaaacagatttaactcacaaagaccccggggtaagggatttccccatagcgaggatagtagaaaaccctcatcctagaatagggtataaacctgtatttccattatataattttgctgtcgtaatagatgaccatttacttggcataacccatgttattagaatgaaagaacatacaaacaatgctataaagcaatcttttatatataaagcatttggttgggaagaacccatctatttggagtatggtgctctattaacggatatgcccacacataaaagcgaaataagaaaattaatagaacaaaaacaaatcgaaggttgggatgatattagattgccaacattaatagcattaagaaggaggggaattttaccagaggcgatatatgaatatatagtaaaagatgtaggattaaacaaagccgatataaaagtagattggaacaaaatatattattatcataaaattaggatagacaaacaaactcccagatattttatgattagagatcctatcgcaatagtaatagaaaactatgacgatattatagacaaattcgaaataaaaaatggcatcccatataaaaagatttctaaacatccagatgttgatttggggtatagggaattaccaataaaagaggtattatatatagacaaaagagatgctgaaaggctcaaacaaaagccattaagattattcgagctattcaatataaaatttgtgggcgaaatagaaattgagtatggcgatgaatattctaaaacaaaagagaaagcttatgctgttagagttatatctttcgatgtgcaagaagcaataaaaaacaaataccccatagtgcaatggttaccggaatatgaagaaactacattatttgaattggatggatataaaaaagcttatgtagagccaaacattaaagagaattatgtgcattttattagagaaggttattataaaagggaaaatgataaatggatatttagtgtgaaatagttttaaatgccctattattaaaacgccaatgcgtggtatagtgattagctatagaaggggcaagcacacccagaataattaccaagttatagtacaaccagagaatgtattcgataaaaaagaagcctctaaattggttggtaaaaaagtaatatggaaaagccccacaggaaaaacctttgttggggtaataacagccccacatggtaataaaggcaaagtaagagtaagatttagaaagggggtcccaggccagatgttaggtaaactagtaacaatacaatgatccgcaatagaatattagaaatattaaacgaaaggggaaaaatagagttcaaagagctggtaaaagagttaaaaacccacccatatgttgttagaaaaatagttgaagaactaagaagggaaggaaaaataaatctaacaaaagaggtttaccatcacaaacccaaaaagtttaaactatttgtatcactttagagttttcaaattctcgattttcgttttaacattttcatctatagaagttatggcactattgttagatttagctaagctattagccaaatataaaataattgctgccaatgctatagatattgcaaaaacaataataacatctatagcaatagcttttttattggccatccctataatataaatggattggttaaaagttttaaggaatatagcggattattggtttggcccaaatactggaaaaatgctaatcccggacaatgctaaaataatatttggaaaaactaatagacccaggcaggtttggtataataatagaaggcttttctctattagggcagaggatttctattatattttaggatatggagctttgttaataaaagacaaactaaagaaagtctatatcgatacaagtttagagaaaaaaagctctattattgggaaagacataaaagattatgacaaatttaaaccaggagagaatgtgcttatttattataataataaacctatcgctgttggtattgcgagactttcctataaagagatttatggcaataacgaaattataaagataaaagaaaaattctcaaatgatagcgatagtaactggggactctaggggaataggaaaagcaatagcagagagattgtatggattaggatataaaacaattggcattgctagatctaatgtaaaaaccgattggatacatgttacaggggatataacaaaagaggaaacatgggacaaagtattagaattaatagaccaacccataagggtttttgttcacaatgctggaatacacgaaaagaagacattcgaatataatagtttggatgaaataaaaaaagtatatgaagttaatgtttttagcgcgatattagggttgaaaaaattatataagcatatcccaagggatgaaaactctttgatagtatttatttcatctataaccgcttttgccggttctaatagtgggggtataggctatgtttcttctaaagcagctttggttggattggctaaacaattatctaaagaattaaaacctattagggttaatgctattgcccctggttacaccgaaacggatatgataaaacattgggatgaaaaaagaaaagaagagacaataaaaagaatccccttgggaaggttagggaaacctgaagatatagcagatgtagtagagatgttaataaaagccaaatacattaatgggcaaaccatacatgtaaatgggggcttatactagtgcggccgcggggattcgaaccccggcagggactaccccatcgggtcttaagcccgacccctttggccagctcgggcacggccgcagtagttaatacaaaatcaatttaaaaatttagtagccgaagacaatttttaattccctcttagcattttcttcgctatctgaggcatggaccacattataaacagctctcccttctaagtttgcaacctcaatagaatcactagagaaatcccctctaatggtgccaggcaaagcttttaatgggtctgtatctccaattaaagttctaaccttctctatagctttgtctcctttaattctaatagctacgacctttcctgataatatatattctattaatgcctctctaacttttttgcctatctctattgggtctctagttttatatacttgttctatgtccaagcctttttcttcaaatatttttattagcttgttacccactttttcataccaactttcggggaaaacataaaattgttctgccatttctctagtgaattgtaacatcttaatatcggttatttctaaacctgcattttctattctttctattattttacctataagttttctttttaccccgtcaggctttatcataagaagggtttccattgggatagcaaaatattcaaattagaggtttgcttcattattagacaatttttaaatattactctttagtagtataatggacttagaaacgaataaaagaaaactaaatttcctaattagaaaccccataaaagcaatgtccaaactaggagaagttcgtgcttttttatctaaggacaaacttgttatatacaataattttttcaaaactggcaaaggattcctttactatttaactccaagtgaagaagagttgtatggagtaattaagaaaaaaatgaaatatcttgaggtaccggttgtaccaccctttgcccgagagattggatattatggggaatgccgagacatgggttttggttattattgtaaaccttactcctttttattgctatatggaaaatacgaaaaccctcttgttggtcgtttgatggaattgtatatcaaaaccaatatagagtatttaaaagactattttaatctattataatttagttcaaacaaattgttttccaacaaagcggtcattgccctttgtataggtaaagctgtagcatatattgtattaacatagcctttcgagtattttatgtttaaccttctggcttgccattcctctacagttccaaaggaatgtaattccctatatttctcttgggctgggtaatagacttctaaatcccattgcattgtaacttttttatccatatctccagaggaattaaatactatcctataagggaggcctaactttttaactattgtttcagcattggaaactaagaaattgtatatttctaatagttgttctttagttgtgaaagcgtattgttctattttttcaaattggtgtactctaaatatgccttttgtatcttttccatgacttcccgcttcttttctaaaagcagtagtaaagccatatactattaaaggcaactcgttatcattaaaataataatctttgtataaaccagcaattggatgttcagcggtagggtttagatatagatcttcgccctctattttgtataatgtatcttcaaaagctgtaaaatatgctgcagctttttctacccaacccctaactaaataaggtagcttcattattttgtaattatattttccttcagtcctactttttaaggtttctaaaacaaacttaattagttttaattccataaacaaacctttttcaaattcgacataaaatctagagccagctatctttgagcctaattcttggtcggcaatatttagctctttagttaaatcataatgatgtttagctttgtctatttttatatataatactaacccttctttgtttaacaaatcaaagtctattgcctcatcgggattaacaaaatattcaggattagtacttctaagaaaatctattaattctttgtatgttaggctatcctttatatacctaggatctaattccaaaatattaatcggttttctttgagtttcttgtttgaatttttctacatccaaaactttcgctactccccaatattttaatggtttgttatacctttcgtcttctccaatggggacatcttctctaatataattgggcatcctccatagaatatcgtttctcttactttctatttccttcaattgtttttccaaaatttctatctctttttttaaggatttggctaaagttatcagatattctttatcatctttaagctctatttttgtattgcaattgtgctctaatttgcctgtagcgatggccttagagattgcattgtgcaaacatcttagattatccaattcttttttcaaagatcgccacaaattatcataagccaaaaattcgtcaactatactagtatccatgaatcttttctttaacatttctttgtatttctctgggtatttacgcaaaaattctacatcaatcatataaatagaacatactataatttaataatggacataatgaacaaacaagccattagggatttatttaaaaggttggaaaaggagtatggattaacagagcaagagaggtttatgaactattattatttaagagggaaaaagaaaatatttataattaataaaccaatcgaaatagagaaaaaagaaagagagggcatacatataattagtgaagagccatttggcttaaggctaacaattgaaggctctcaaatgtttgggcctttccttacaaaaaaagtaatagaattaaatagggaacaatttttgcaatatttgagaggtaaagacttagaaatcgaaactccctataaaaaggaattcgtcgttttgaaatataataacatatttttaggaagtgggttagcttatcctaataagattataaattatttacccaaagctagaaggatatgagggctttctatagtatagcgctattctctatattaactttgatatcccttttgatagcccatgttctaataacaaaaaccaacccaaaatctgttgaaaaggccgaaaagtatatacctttgcaaaaaccagatttagaaaagaaaaaaggttatatagatgtttgttctctaagaaaagaaaatatggttgctgcaatattaagatatggcagtgctgctccaactttgtgttataattgctataaaaatagggacgaatgtttaaggtggtttttagaatttaaatccaaatttaatggaacaatacttaatactgaagacaaatgcaaatcagagaaaaactattattataggttagcttgttatctaattaacgatgtgagccctataaagatttattgcaaatacattaaagaagatgtaaaatttgcaaattttgttagggattattttgacttgtattcgttagattgcccttaaaattagatcgtttattttttctcctctataacccaaagcacctccttcgttaaaatgtttttttattcctttttttccataccccttagatgggggccttagcctaaagaatggttttattcccaattcttttaaagtaacttttccctcgattaatgctttggccaattcttcaaatgaattaaaacctttttcttttatatattctaaagtaagttttttcctcctactaattctaccccttttctttaacaattctgctagggttttttcatcaatttcgccccatgtaatatagtctttggctttttgtatcatcccttctatagattcggtttttggcataattgataaatagttcttcctatgtactctcaatagttttagagtatcttctatgtcttttctaacatctaccctacccctaactctaaatatggcatataaggccattggctttccattatttcataatttaaaaatcagtgtgtggatttttcttcattattcagagggtgttcacttcatcaccaaaggctttaaatagaataatttaaagattgctatgagaacaccagcgagagagtattttggtaagctcgttattagccaaacaggaaaaaaatttggaatagtgagcgatttggtttttgacaagaaaactggtgaaatagtatttttagtaataaaagaaccaaccccccatttggaaaaatataatctagaaaaagacattgatgggtcttatttaataccatttagcgctgtaagatcaataggagatttcgttgttatagatgagagcgaattataaatctggataattggtatataatttgcctcctctcaattccatatagaaaccgccttttttgattatttctctttttaagtctttgtctaaagttaatataacaaaatctttagatagatctttcaaaatttcgtcagttttcccatctaagtttaatatttgggcatttattatttttagatattgcaaagccaattttgcgttccttctatatcggcccttccttttaggatcattagcaatagcttttagctcatttaagatagattttgttacatagtattcggctttgtattttttgttaattaaatctataatgtctataccgtaattaaatatagccataatagcgtttgtgtctaatattatgcgcataccatttttattttctaccaaattaaaagcctatgctattaaatgatagagaaattaaagagctaatagacaaaaaagagataattattgagcctttttcctatgaacaaatccaaccagcatcgatagatctaaggctaggcaatagatttagaattttcagaaaaggcgaaatagaggtaattgatcccaaggattttaaggatgaactaataaagatagaacaagatgaaaataaaataattgaaaaatacaaatataccgatgtaattattacagagaaccctttcattatttatccaggggattttgttttagcctctatatatgaatatataaaattgccaagatatatagcagcacaattgcatggcaaatcctctatagctaggttaggtttaattatacatacatctgcaggttggatagaccctggttatgagggccatctaacattagaaatatttaatactaacaatgtgccaattaagctttaccctaaaatgaaaatagcacaattgcagctatttagaataaatcctgtagagagagactataaagaaaaaggaggtaaatactataaagaaaaaggtgctacctctagtgagatatggaaagactttatatagggaaacttaaatagaataaagctttttccctaaaaggctcaaattttacctttatttttaatgttttttctaaatatgcttttacatcatccatggttccaatataatcgattaaaccacattttttagcttctattcctaaaaatatggtgctttcctttactttagataagcattccttttttatatctctatgctctaatacatcggttaaaaagaaattatataatttgtctgccaattcattataatattgcttagtataattatctaaaggcaacaaaggattgctaaactctttgtatttccctttagagaaagaataatattttactcctaatttagataacaaaccgcttaggtctattttgcctattaatactccaacgctcccaacgaagcttaattcattagcaaatattttatttgtatgagtagcaatccaataagaagcagaagtgccatattgtgcaatataagaaattttagttttgtttattctatctaaatatttgataattctatatgttggttctggagcgcccccaggagagtctatatataaaacaatagctttgtagtccttagcttcttttaaaaaatctataaccttttcagcgaaatcgctcgttattggcttgtctatgtatataactgcaacattccctttagttaaaatggaatatatatgggaaaacaagattatcccaactaaaaataaaatccaagaatttctttttattatatcttttatatcattcattctatttcaattccaagggattgtaagttctcctttgttgtttctgcaatatatttggcttttacaactattggatatggcttagttagccttcctattaatttgttatagcccaatttttctaaatctattatatatttgtccccttctttagttactaaaccctttttgtataggttatctagattttcaacaatagttcttatatttatagctttaatttccttagttgtagggttattaaatccttttgcgggtatataaatggatttcttatggtctttcattttaccataaccagcttttccccttcctcctctaataccggcatttctatttctatcattgtaaccccttctagcatgtctttcccctttatatttatggtattttttccttctcctaactaccattacgcataaaagcgaaacttattaaaaaatgtttattgataggcctaaatgcttaggctagaggaaatagatttggatactattaaaaaggaattggacgaagaaaggaaaaaagttgaagaaattatgaaaggaaatattccaacagaaataaaagatcttattaaaatggtattgtttattgtggaatccccaaacaaagctagaactatagctaatttctttggcaaaccttctgtaagaaggataggaaatataaaagcttacgaaaccacaacaggtaaatatatattaacgatagttgccacaaagggacatctatttgaattaacattaaaggaagaaggtgtttatggcgtattaaaagaaaaagagtatgtaccgattttttccccaataaaaaaatgtttagattgtgggcatcaatttgttgacgaagataaatgtccaagatgtgggtctgaaaatatagatgatgccagcgataggattaaggttttaagagatttggcccaagaagcagatatagttttgatcggaaccgaccccgatgcggaaggggaaaaaatagcttatgatgtttatagcattataagaccatacaataaaaacatctatagggcagaattccacgaggtaactaggcaagctattataaaagcattagaagagataagggatataaatacaaatagagttaaagcccaattggttagaaggatagaagatagatggatagggtttgctctatctcaaagattatggagtaggtttaagaaaaaaactttgtccgctggaagagtacaaaccccggtattgggctttataataaaaaggtatgaagaatataaaaagaatagagcccattattatgctgtaaaaaccagtgattttgaagtaactttcattagcgacgatcccttagaaaaatatgataaaacaataaaaatagagaaaatagaagaaaaagaaagcgaaaagaaacctttgcctccttatactacagatagtttattaagagatgccgtaatagagctaagattaagcgttgataaaataatggctttagctcaaaacctatttgaatggggtttaattacctaccatagaacagattcaacacatatatctaatttgggaatccaaatagcgcaaacatatatagaaaatactttcggtaaggaatatttttatcctagacattggggagaagaaggcacacacgaagctattaggcctactaaaccaatagataccgaaaccttaataaaaatgctaagagaaggcgatattcaaatacaaggtataactaaagagcatattaggttgtacgatctaatttttagaaggtttatagcgagccaaatgaagccatttattgctatagaaaccaaatttaatgctgtatggtctaacttaaatacaacaatagaaggcattacagatataaaagagaatgggtggaatttaattaaaccgattaaattgttagcaataaaagaaggggaatacgaagttattgatgttaaacattggattggctctaaagttccattgtatactcaagcggatgttattgaattaatgaaagagcaaaacattggaaggccttcaacatatgcaacaatagttaaaaagctctttgagagatattatgtaatagaaaaaaaccaaaggctaataccaacagagaggggcataaaagtataccaatatttaacagagaggtttggccatttagttgatgtaaaattaactgcggatttgttagaaaaaatggatagaatagaaaatggcgaactggattacatggatgtattaagatcttttaaaaaagagctaatagaaatatggaaaacgaaagaaaccaaatatattgcagatggaatatataaatggaaagaatattctgtgcctgcaatagtttatgagaggtatgaaaaaatactaaaaaggaaaaaggtttatcctgaatatctaacaccatggtctagggctatttataatgctttaccattagataatgaaatagaaaaacaaacattggctttagcaatagagaaagactttgaaatactaactaaaaaacctatacttagagaatacaaaaagaagtatgaacatttaaagaatttggtcgaccaactattataactttaaatcaatccctatttttcttcagatggctgagaaaccaccatatgtaaagtttgaagttccagaagagttagcaaataaggtctatgaactggttagaaaagccagagagaccggaaaaataaggaaaggaaccaacgagacaactaaagctgtagagaggggacaagctaaactagttataatagcagagaatgttaaccctccagaaatagtaatgcatttgccagcattgtgcgaagagaaaggtgtaccatatgtttatgtcccatccaaggaagaattaggtaaagcagcgggaataaatgttagtgctgcttccgcagctataatagatgcaggagaagcaaaagacttgttagaagaaattattagaagtgtacaagaactaaaagctaaatgaaatgccctgtttgtggcaataaattagaaactattgaaactgtaaaagagattccttattttggaaaagttctaattagtacattaaaatgcaacaaatgtgggtggaaagatactaaaatttacatattggaaagcaagcctccggtagagttcaaatatacaataaataaagataatttagggaaactatttgttctaagcgagggcacaacaattaatataccagagttaggcattacatacaaatctgttggagaaaataaaattacgacattagaaggcttaataatggacataatcgataggctaaaaatattaaaagatgaaaaagttaaagaattggaaaaaattttagaacaagtcaaagaaggtaatagatccctagatatagaagttagggatgaattagggctatctaaggtattggattggtaatttgttttgctctttgaatttaactagccttactaaataacccgctatttggtttctgaatttttttgatactttctttaatagggcttggactagttttttgtttttttcaaaatctttggtccatatatcgggatatcttttaaatagttctaaagcagtcctttttactacttttatttttactctacccatgtgaagtaatacaatttagctttataaattatgggtttacaaaatggaatgacaaacgaaggtatcgtaaacgccccagtaacaagagatgacttagaaaaagcagtaccaggtaaaggtaaattaattagagagataaaactaatacttagagtttatgacaataattcattagaagttaaagttgaaggagtaacaagtacattcgaaataataggtgctgcagatataataaaaagaatagtagagagcaacttgtctccacaaaggcaatagttggattggcttaaattatataaagaattctataaatttgaggacaacccttttaaagaggggcaaaccatagaaggacaagcaaaaataattaaagagaaaaccaaacccccagcaaggtataatgaagcaaccctattaaaaaagatggaatccttgaatttgggcacaaaaagcactagggctttaattattgatattttattcaaaagaaactatgttaagggcaaatctatctatattacccccttgggggaaaaggttatagaagtttttgaaaaatacttacctcaaattattgatgttgaattaacaagaaaaatggaagaatatttagaaaaaatagagaaaggccatttagaatatagagaaaaagctattgaagaagcaaaacaaataataaaagaagttactaaagaaataaaagaaaaagaaaaagagattgggaaagagctttatgatgtttatcttaaagctcgtaattcacaggactctcgctcccgcaagcgtggcacttaatataatatatttttctccccctttctattaattcggtatcgggtcttttgcatactggacatataacgaaaatattaatgaattcgtcgagttttttctttattgtttcgtaagaaacccttttatttattattaagctattcccttctataatggtttgaacaaataattctttgctaaagaatttggctattatctttggatctctgtttagataattggcaatttgcttaaaattggttataatagttcggttttttacatattctatatgtgggataggaggattccaacgaatttgttcttgtttaatgacatccttcaatttttggtaggccctttctaataattcaaaataattatattccattgggttttctattggttctcttttaaattctttatttcattataaaggctctctattaatgcccaattttttagcaattttctattggcttcttcaaccaaaactttaatatattcctcgctaactagatgtttgtttttgtatacaatagtttcaattctgtcgtggcccataatatacagaattaccctttcaaatccatattttttgttatttacttcgtatttgtcgtaatatatttggtctgacaattttatattaaataaagcgctatatttcaatccaagcttttgggctatagataatagttttagcccatcatacaaagttcgagcctgtatatgtataataaaaggttcaaacttaaatatcaaaggcttttctcctttgtaatttatataatattcatatagctcttccgctttaactggataatggcttttgaataatggatagctattgtattttttacccccttctacaaataaagagattctcccggaacaactggataaagtaaaataattatcaaaactatttattaaatctaataaaggaattataggtttatccacatagcctaattgtttttctctctctagtctttcaaggaattgcttttttagttcatcaaacattgggcaaacatttataaaatcttaaaagtttatccctaaatgaaattggccgaactaatagaattaccaaaagagcaatgcaatgataaaaaatgcccacaccatggacatctaaaagttaggggattcttctttaaaggaaaagtaatcaaaaagagcgataacaaaactgttaaaatagagattattagatattattggttacccaaatatgagagatacgaattaagaagaactaggataacagcgtatttaccggaatgcttaaaagacataaaagagggagattatgtattaataggggaaacaagaccattatctaaaaccaaacattttgtagtattaggcaagctaaagaagggtatagctctaactcaatgaaaccaataagggctttcatattaatacaagtaaaacctggctacgaaacaagtgttgcagaaactttaactagttatgatgaaattgaagaggcttatttagtttatggtgaatgggacatagttgcaaaagtcaaagccccaacaattggggaactaaaagatttaattgtgaaaaagataagaaccattcctggagtagaaatgacctctactctagttgttgttgagtaacctttcggaaaagctgaaattatttattttcccaagctctttcaatagaacaaaaatagaattggccatattttctattaaactttttatgaaaggtatatttttatagaaatctttgaatctgtcacaatccttttggcattccaaaattagtttatattcttttaattctatcgatatttcgttcttttttatagagcatttcatatttatttttattttgaatttattgccaaaatctggatcaaaatagattgtattatctttatctaattcgcattcgaagctatcttcgctaatttttagcttattaaaagataaatccttaaaaccaggatcaaaattctgtttgagccaatttattagaaaattatagctatccaaaacctttatattccctttatattgaatttttatggaaaaacttgctaactcagtatcgctcattattccaatacccattataaagctcttctgctggcattagcatttgtataaaaattaattgtatccatgcttcgtttatatgaattttagctttctttggaaaataaaatgtttgagtaaattcccctttataaccaggatcaaacaaagcagtttcatatttttggattcccaatctatttaacgaacttctaggtaatgctaatgcaaccatatatggagggataacaacttcagggaacactacataatacaaaccttcatctaaaacccaataatcatctataggttttatttcttctaaattctctcttagctctacgaatttatcgttaataataaacccccttttgttaccatgtaaataaatgtaatcgaaatcctttattttgaatacctttttaggtttaacatctatacccgcagggtttactttaacatattcactaacaaattttttagctatttttcctggtataatcatttttcacatttagaataggattcgcatatcgctttccttaaatcttcagtagtcactttcctagtatagatatctggatataacacatcatttataaacaatgtggggctcccttctacttgtttcttttctactaattccatatcttttagcaaatatttttctgcttcctctttaacacatttttctataacattccaatctatacccaattttttagcggtttctttagctattttctttaatttttctatatcatttatttcaaaagcatgtttatttaactcaataacaaaagaggcccatttctttataccatatttattgtatacacaaacttcataagcgctttgtaatacctctgctggcccatgtaaagcataaaaagtagtatttcctattttatagcccttttgcccttggtataacggtttgttatataccatataatggacatggaagtccattgaggtattatttagcaaaggtagcaataagtcctctgctcgattaccatagggacaattggccataacatataagtctacttttggaggggtatcgctaacatttggttcaaatattggagttctttttatatataaaaattccaattttccaattttttgggccgatccaattatataatcatctacaacgggtatctctacttctactttgcctttctcactcttcactataacatcgtacaaacatatagaacctttttttgaaatgctctttatttcataattttttgaaggaaatagtctatccaatatctcttttgagcaatccgtttttgtgaaactataattataggctgtataagccgatacagccaatattatccctgctgctacccctattaatatactatgcttatctagattgtttaagaaattttttaattgctcttgccatttttttacactcattacaggattataacagaataatttaaagctatatctttagagagatccctaaaagttttttactaattctctctatctcttccataaatacatctttttctctatcaattattataacgattttttcttttgctagtctatcgaaaaactccctgtttttcaaataataagggtataaaacgatatttatatctcctatctcgttgcatttggcatttgccatcttaaataataaacaatcataaatattgccccacacacttagcattagccatttaaataatgatataataaaaacctaaatgggcatatttgatatgtttaaaaaagaagaaaaagaaaaacctattgaagagccaatagaagaaaaaatcgatttgcctatgcaagaacaagaacaacaacaaatgccgttatatcaatatccccaacctccccaaccaaattttcaacccaatgaagacaaaatagagctaatcctagcgaaactagaaacaatagaagcctatataaagaatttagagaaaaggttggatacattagaattgttgttaaaacaaagatacttatgagcgaaaagaaagaacctgctaatatagcagtatacttaatagcttttctattattaatatggctatcaaatgtaatttactatttattgcaacctccaaaaagggtaaagaaattgctatacaacgaaagtgtctctaatggaaattgtactgtgtttaaagatatacttttatcggataaaggtattgaaatagatataaatcctactccaattgttttatataaaacaccaaaactttgcctaacttcttcgatatataatgtggatcaaataactttgtcagataaagaaggactattaagaatagaaaaaagtgatggccccattataattaaatccggtaataaaatagtatataaagggatagcagataatttggaattgcaaataaaagaaccaacaataacattagattatagtatatttccaaaaactatatgtttatacaacgttagttttacgcaaaacgaggtattatatataacatattcaccctacttgggaaaaccatatttatcgggcaattgtgttataaaaattaatggcgagctcgtttccgcttataatacacaaatacccataaagcttaaaattggcacaaacaaaatagaaatagttaattgcccttctggtaaaatagtttttgtcccaaatatggacaaactaaaaatagagggcaatgtaacaattaatgcagaattcgatggtactattgaagtttgttctaacaaatgcgaaacttatagcgagaaaattatcaatttaagagtaaagaacccaactttgatacccttaagaagaacctacataagagagatgtcaatatgttttaaataggatagacctatttttttatgaaagaagaatatgctatagtattagattataaccctactgaaggtgtagtatatgctgtgggaactaaattttttacattgctaaagctaaagcctaaaccagatgctgtaatagctcctttggaaaaagtatatgtaggaccaggaaaaagagataaaatccaatatataataaaaaggctaaaatacgacgaactaacggattttgctaaagaacaattagaaaaagccatagaacaaatagtaaaagagagagaaaaagagtttgtagaattctttaatatggctgggcctataactttaaggttgcattctttagagttatttgaaggaataggtaaaaaaaccgtaaacgaaataattagcgaaagagaaagagaaaaattcaaatcctttgaagatatagagaaaagaataccaaaactaaagaatatagtaaaaataatagctaaaaggattttagacgaattaagatgtaaagacaaataccatctatttacatctaggttttgttaattttccatagccatagaaattttggatctgcatcttttggttttgggtttagcctttctttgaaaaccaaatcgatatattctaaggggtatattttatagcctacacttactataaaagaaattatttttcgaaccatatggtataaaaatctatccccaacaattgaaaaaacataatagtcttttctttcctctatatcgaattttattatagtacacaatgggttttttgcttctctctcaatagtaaaattagtaaaatcctttttaccaataaaatgtttcgctgcttctttcattaaatctaaattaggcaagccctttacttttatttttgtttttcttacaattatgtttccaactttatgtaaataactaatttgttctattgctttatcttttggcaaaaaatatttatattcttttgataacaccttatttattggctcttctcctaaaagaattacatttttcggcaatacttttggtatattcccataaaaatagttttctctcgcagaaacatatttatctgtcctcgaaatccatttacctttaattagttgggcgatagctttgtttggcctaaaataccaaaacttataataatacatttcttagcaatctaattcctattcttttaaggatttctcccataatatgggccatcgggaaaaatcctaatatcactaatattagtcccactaaagcagaatataaatcatggcccaaaacaaatgcatactctttaggataataaattattggagtaaccaatatttgtaggaaaaatatctctctacttctagctaacaaatatactaaccattcgacccttttaaagtatagccataatattagaaagccataaattataatagttatagctgcttctaagcctaacaaataaaatgggtctttcgatagattagaaaagctttgccttccccattccatccccatccaaaagcagctgtttgcgttaaagattatgtcttctttttcaaaatgatgcaaagtttctactaacaaccatgaaacatatataggaattacaacccaaagtaattctaaatgctttaatggcgctaataatagatctaaaaatactttaataaaatgcagataaccttgtattatatccattgttctattgttttttctctttctgttgttaattctccaacttctattattagttttttagctaacagtttactatattgcctagctattgtatcggccaaaactattggttcatatactccataataattagtataattcgcaatgttttctagtaaatccatattattgggactaataactattaaagatgggtttcttccgaaatatgctaaaatagttttgaattttttattgaaaaatattatgtctctgccttctatatagaaaggttggttcttctccaaataatacaaagaaagcaaatctaaaatatatttgcttactatatattcgtctccaaatatattggttattccccaattggttatctttttagcaaaaaatattgttttctctaagttggctttaattaaatccctatactcattaactataggtaaatcgtatttttccaataatcttttatcaatgttaggagagccatctattattattgttccatcgtattcgttaattagttgccattcggtatatttcattgctaatgttttaacattttcatcctctacatctgttaacattgtattagagttataataatcgttatctttattaactattactgctccaacgattagtgctaagcggttccctctaaaggggataactctaatagaggaatcaatagcgggcaaagctccttcttttgtatcaacaaagtttattctttctttaatagaatcaaaatccaattctagctctttttctaaatagttttttagtttttctatccccactatttctaatagcatttgttaatactatagaaaagctttaaaattgaaaaaaacttacccaagtgctaccaccaattagatgttttagttgtggcaaacctttgggacatctatgggaagagtttaatgaaagggtaaataaaggggaagatccaaaaaaagttttagatgatttaggattggaaagatattgttgtagaagaacattattaagcgctgtagtagtatttccagtaatagctaaatttaagaaggtttagtcctctctgctatcactataaaaccattaaactttaccccactaatctcgaatctcgttccatttggtgtcttagttaccctatgctcttctaaccaaactatttcggtattaaacccatccaatatatctattaattgggaaagcttttcaaaatgtataacgaagataactaaatattttttggccttatctttaactttctttacaacgtctataacatttttcacatctataataattagatctgcttcttcatctatattttctaaacctatctctctttttttgataataacattatcgagatttgctttgcttaggttttcttttagtattgggatccatctatcgtctttttcataaactattattttgtttgggtatactaaataagctaaatacatagttaaactaccagagcctggacctatttccactatagtccaatccttttctggtagaactctcgctataatatagcctatatcttttaacattaaactttgggggcccctttttcggtttttccatatatcatataacatataaagaaaaggtaataccaattaaaatgatgagcagttactcccctgaaatgtgatgaatctctaatccactgatttttaaaaagctataattggtaaaccaaatgaagtgctcttactgtgggagagaaatagaacctggtactggaaaaatatatgtaactaacaaaggcaaaatatactatttttgctcatcaaaatgtgaaaagctaatgctaagaggcactaaaagaaagaaatgggcaagaaattcttagtttttgattatgatggcactctattaaattctatccctattctagctcgatatatttacaaaaaagtttctccttttgttaaaaccgatataagagagatagaaaagctaataggttttcctatacacgttatagcttacgaattagctaaagatgaagataaagcaaaaacattaataaaacttatagatttgaaagaagcatttgaagaatacaaaaaagcttctttatactgggacgcaaaaatagcaatacctcaattgcataaaaattatagattggcaatattaaccgcaagtcccagatattttgttgaatcgactttgggagaatacaaaaaatatttcgatattattgatgacaggaaagaaaaaagtgatttgcttgataaaatagatgcaatagcttatgtaggagaccacatagtcgatatagaaatagggaaaaaatataatattccaacttatctaatagaaaggccccataatttacatataaaatataaacctaaactcaaaaatttgttacaattggttaagatattgaattaaaccaactaaaaatttgaaaccatccaagcccggcaaaggaagcatgtttagtataaataaatagaaattcatatagcctatcgggctatctctgaatattatatataatagcaaattagccaatggcccagcaacagctattaaagaataatgtaatggattagttatataaggaataacaaccattgctggaacgaaaaatattattggaaaatctattaatcgaagaaataggcctatcaataaaccaaaccaattaactgttatatatgcgttatagcctaaagctaaagctgttattttatggaataattcatgtaaacctatggataaaaaagcaataataaattgctcttttattatatcccattttaattctgggctaaatattaggctaacaaccaaagaactaaccaataaatagataatttcctctattgttatcattgtatgtctttcaaagttattactctttcctgggcatttacattggaatccaaagctaatattaattggtatttgccttttatttttgcgtaggtttcgttatctaatattttatctattgctattccatatgcgctgggcaatttatctatctcttctaatggcttttcatcgataatgttaaattgctcatcaaaaactattgctttctttgtatcgaaaacttttgataataattctttgtatttttctttgttttcgtcattattaatggatatgcgcaaattctttatgtattgctctaaaggtattttcgattttagggcctttagaatctctttgttagttagctcttctacttctcttcctggaggggctacagccacataatctatatctgcgcctgcagctaacaagtttcttaatactagttctcctcccctatcgccatctatgaataaagtaactttctttctttttgataactctacaacacttttaggaatgttaataccattcatacctaagacatttagtataccgtgttttactagattaacaacatctgctctcccttcgaccaatattatttcatcacttttttctactaatggaccagcaggtaatttttcttctccgtattctattagttgcttagaataatatgcttcttccaattctcttcttaactcttcaatatctggggccgtttttgataataattgaacaaacaactctttagccctattccttatatattctcgcttagaagacctaacatcgactatttcttttaccctaaacctcgcttttgctggcccaaccctatcaacagtctctatcgctgctgcaattagagaagtctctaccgcttttaaagaagtgggtattgtaatagtcccaatagttttgtttcccactcttttatattctacttcaattcttcccaatttgccttgcttttgcaattcccttaaatctaattccatccctagtaaaccttcggtttggccaaatattgcaccaattatatcttctctatctactataccatctatttcgaattcggcttttattatatatttatattgtacaggggcaaacttcgccattcgttagcaaaatttgtaatattaaagcctctccgcttctttttttagttcttcaaacctttcatctatttctttctttagtttatctcctatgaagtaatggccaaaagcatcaacttttgcagcaatagcaatttttgcggctaaagttcttgccatcctacctcttaattttttaggcaatttttgaacatatggatggttaaataatactccatgttttggtgggggtgtgcctttagttaaatgcttaaacaatgccttttccgctcctaatacttggatagttgatgctggtaagtaagctaattcttttaaaccgccagctaaagctaataacctcgctccaactaatggtccagcaatagctgttacatttggggcatacctctccatcatttgttttatgtaattttgtaattgctttctaaattcatacatatcttttattctttgagcgaaagtcattaatatttgtttgctttcctcatctatattaccacccattgttttgtctaagcccaattcttttaaccattcttctctcggtttctctaataccgctttcacaaattgctcgtggtcttcaaattttttacttaattctgggaaatataattcataccattctctaaacctttccatcattaagtttaatattttattagtatcgtccaaagcttttattgcttgtattattaaccagtcatggctaacactttcacttagctctcttattgttacctcgtattgcacatctctaatataagagaaattatcattttctctcgcatagaatagagctttatttattagttttgtgtttaaatctaagggcaaatctaatcccttataagcccttcctaatatttttaattcatatttgcttttaagtttgtcaatttctccttttagtgattctggtaatattcctttttttaatttgtatgcttcttcttcactaaattccattggcttatattccaataaagtaccatcttcatctaaaacatataggccattcaaatgtataaataggtaagccatttagctttgttagaccattatttataactttattgccatttgctttttaaagagctattgcataaaatagaatgagagacgactggtttagaaggttgttaagagatatctttatgttagaaagagatctattagagaactttgatatgggatttgattatgcaattccgggaatgcaaatgagagaaacagaaagctattacattattactataccattaccaggagtaaggaaagaagacattaatttatatttagatgggaacaatttggttattgatgtccactctaaggccaaagaagagaggaaagagaaaaacgaatatttcgttaatgtaggagagatacatttacatagggagataccattgccagcgaatgccgatcctaattctatagaagcagagtataggaacggtttgttagtaattagaataaagaaaaccaaccaattcagaggaagaaggatccctataaaataaatccttttgctttcaaattaattattttatataacaaatcataacagcaacccctagaacttatatagtttccatcgaaaaataaatctgtttttattgtgtttactccatggtctcttagatattgttcaaactgaggaaattctaaataatcccaagttgtttttttgcccttaattagtttttgctctgctaaaaatattggagcggttctaatagctaccactgtgcctttagttaatagatagcctatcaattctttcaattctattacgttaaagctttcataatcataatagcttattaatatagctatgtcgaattgtttatatggggacaaatcctcaaatttgtaatcgggcataattttagtattttttattcctgttacactataccctttcggggttgcaacttttatatcgtaattatcttggtcaaaccttttatataactctaaaaaatcgtcatcataaaaatgatccgttaatagaaaaagaactctcattaaaatgaattagaaattaattaaaaaatttagaagaattgttggtcttttctcatttcgttcatgtattctctactatagtgagctctggtccagaattctttctttctataggggttccagttctttaatggtctgtaataacctattattctagaccatatctctacatctgtgctaccacaggatgggcattgtgtgtacaaaccagtgtagctctttttacaatggttacatactgttattgctggagtgaatgaccaatatactattttggtttttagtattttcttggttaatgccgctaatgcatctggttctggttgttctcctaagaatatgtgcatcattacacctccagtaaattctggttgtaccatagattctattcttattctgtcggacaattctaatgctccataatatggagcaacgcttgttgagtatattgggttttctggatcgtttaaataattcaatacttctgggtatttcttagcatcagctattgccaatttagctgcagcactttcgccgggtacttcttcaacattccatggagtgccatccattttcatccattctctagcatactttactgcaaatcttaccatgtctctcattagtttcgctgcttctaaccaatctttcctagaaccttcgaaccataattctgggttattcatatatatagctgcagcttctggtaggcctattatacctattgtattgaagtgtgagcttgggaagtcccatagataggaatggaagaacttgtacatctctttgtgtgttcttattagttttacatatctttctctgaaccagtcttctatttcttttatgattgttaatttctcagcatataattcccagaacttgtcatcgtctttagcttctaatgccaaccttggtaggtttattgttgttacttgtatagacccagtaacatctggcattgcccatagcccaccgaatctttgtttttctatctcttttattctctcatcttcatctttcttcttaacgctaaatgcgaactttaattcgttcttatctatgtttatcctacaacacattgcgaaagaagcattgggatcgacaacatttgtgtttaaccaatagaagctacccctctttgctgcagttttgaatattgcttcatatatttctggatcgttccatagcattggggcagaggccattaatgttggtattgggtatgtaaatggttgtccaattgcgtcgccctctcttaatacttcagttaatgctaataagaatagttttgcttctttttcgtattctcctaatggggcaacctttttaccatcataataagcatagtccccttctaatatagaggttgcagcgtccattgttactgtgaagtttgtgaatggagattgcattccaatcctagatgggtagtttaagttgaataccattctttgtatgttttgttttatttgtttgtagtctaacctatcatttctaatgaatggtccagcataccattctacagagctaaatgcttgtgccccagtaaagtgttgttgtgcaattattaagaaattagctacatggtctacaaatgtatcgaaatgtttagctggtttagatataactgttggtgtaatcatacctttttctaatactctcgctaaggaatgtccagaacaatatggaacatataatgctaaaggtaacttatgtatataaatgtctttgtttaagtgtgctttcaatggtctctctggcattattgttaaatgttcttccattgccttttctaatacataagcgaagaaacctgttggaccagggtattggttagcgttttccaatacttctagggaattcctttgtacatactctgtaaacaaatctttgggctttgcctctacattttctggttttttaacttctattgggttcatagagatataggatgttattttttaagttaggagaaacaggcttttctttaaacaataacgaagaattacaatggtatttttaaatggtgtgttatatatgcactgcggccgtgcccgagcggtcgaaggggtcgggctcaagacccgatgggttagtcccgtccggggttcgaatccccgcggccgcatttggtaattttatctgccacttctataggcaataaatattttttagaattccattcctttataaactctttcagaaactctaaatttgttctatttccaatagttacataatgcccaacaaaataaccgactggcatattatgggcataaattatattgttctttattttcccatatagcaattttttagcatctccaattgtgggcaaatctaagacggttccaacaaaagttgctaagcccatttttctaggatgggaaaggccatgtccattaattatatataaggcagtgtagtctaaatcttttagtatatttacaatagggattccttcccggaaagatagatatgttggtatataaggaaactctatattatgtttgcaggttttggtttctattagctttttgtttttgtcaaatatggctaaggctataatattatttttgtacccaatgtctattccaataacataatcatattcgggataatcaaattttattttgtttaccaaatattcctgtattttttgcaattctaataaaggtttgctcgatttgaaatccttaaatattggggcataaactttgtttcctattattttaacttctttctctaacaaagctttttgcatagggcttactattaaattagagcttacaaccctataccaatgaggagcttttttataatacattgctacaaactttgttgctattgggtctcctaaagctttggccaattctttaaatgtggtaacatagcccttgggtatttgctctattaagtttattagttcgtttattaatcgtttgccaaacttgttccaataatttatatctaataatttagaagaaagcaagtagtcttttgtctggcaatttatctttgtctttctctggatctaattcgtataccctttctatatggatttgggttttctttagtttatggttactccctaaaattgagtaagtatagaatatagcatcttctttctttaatgctatgaaatacttcttaaatctaaattttagagagcctttctttgcataaccctcaacaacaaaaactttcttttccatgagagattatttttatgggaattaaaaatttatacaaaaattattgatgcataccctacaactaacgaataatccccagtaacatcaccacttgtataataatctaatagtattggttccaaacccctttctttagcaaactctattacagaaactatgggtccccaaccgcatacggtagcgccagtccttacaatttctttataaaatcctaggctatctaattttagtatatagcttattagcttcatatctaattctttaacttttcttccatcgctaaagggtttatatccatatatgtcaccataatgagtaaaatcgctcgaagccactaatctaaccctttctggcaattccaatgctaattgtttaccaacttcttttgcaaatctatatacattaaacataaccgatggcactattaagaaattatctccatgcaaatattgtaaaaatgggatttggttttctacactatgctcgtataaaaatggcctatcatcataatcgaagccatttttcataaatatcatcgctgcctcttcatctattttggctatgcctaatggggtttctataggcattaaagatacattagccaagctccctaaacctgtatggtttgttcctattattgcataggttttatttctatcgctattaatccagaattctgccatggctttaccggaatatatatagcctgcatgaggaactatgcctgcttttaatgaatactctttttttagtcctttaaataattcgtttagcaaagctattagttgttccctattggatggataaaacttaccagctgcgaatcccattaaataatttatatgtaagaatttataaaccccttagctcttctaaagctaatctaacgtcttgttctttaactgttactctttttgcgtgttttgctaattctgcagctctccttgctactctcttagcaatctctacggcaacttctacaaaagcttctttagcatcctttgttactctctttgcacctgcttgtctcattatcctatacaatggcgcgactgggaatgggtattttcttttcgccatacaatattttattttagctcattatttaaagctttttgtctggtttcgccccaaccaaattaagagcttcgtctatggtcgataccccatatatattaatattattgaaatactcttttggtacatcctttaggttttgtttaggaataatgatattcttaaaaccttcttcgatggccccttctattttaggtattattccccccacgggtaataccctacctttaacatctatactgcctgtaattacaaaggattgatctaatggggttttagttaaagcacttatggttgctaaagcgatagccaaagaagcagagtccccttctatttcttcgtaagtttgtacaaattgcacataaatgtcatactcttttatgtccttaccaaagacgctttttacatagccttcgatagtttttattgcttgttctgctatttttcctaaaataccagaagttattattttgccatttccataggcaacattaacatctattggtattattacccctttgtttccaataacgcctatgccattggctctaccaatttcgtatccttcttttattactatgtcataccttctcctaagttctttaattctttccacgatttgttcctctatagattggcctatcctttccgcttctataacatcttccttagttacatattttttacctttgctttttgctatatctcctgccaacctaacatagccccccaattctctaagccttaatgttagatatccttctcttcccgctaattttttggctatatttattatttcttctacagcatccctagtaaaatgtggtattttgccatccctcattatttcttgtgccacaaacctagcgagtttttccctattctctggggtatctggcatgtcttcattcatataaacttcgaaaccattccctttgatacgggatcttaaagctgggtgcatattttttatagcttcctctgtacctgctgctaccaaaataaaatcacatggtgcaggagtggttcttactattgagcccccacttctttcatctctcccaaatataggatattttttctcttgcatcgctactaataattcgtattgaacatcccatgggagagtagctatttcatcaataaacaaaactcctttatgtgctttatgtattaaacctggtacaactctatggtgggcaggggtttctaaacccccgctttggaatgggtcatgtaaaacattaccgaatagttgagatggatttgccccggttgcatcaacgaatggcgcatgttttttgtcagaattatctattaatagtttgggtatactttccaataattttctcttattcattacattaaatcctaatgataagcctactaacaaaatagaagacattatcatcgatgccgcagcaagaattttttcgccagtatagtaaaaatagaaaggcattaacaatgctattaaagcgattattgctgttaattgatttttcccctttagggcatttaaagcagcaattttacttctttcaacgatttttttaccttcccctgctgggacagttttaattattggttgaaactcatctttcggattaggaaaagctaagaaatcctctaaaccctctttaggtaaaagctctgccattgctttagctagcatagatttacctgtaccaggagggccgattagaagcaaatgtcttctattttggatagccatcttagctaatttgacagctttatcttggccaataatttggtctatcaatttttttggaacttttatttcttcagtagttttaaaatccattggcataaaagggctaaaataattaaatattttatagacctagcttttttctaacctctgggtttactctatctatagaccatggcttatcagatatttcaaattcgacgtctaatccaaatttttcttttatttttgtttgtatttcatcaaacatgtatggtaaataaggacataaaggagtagtaggtatgaattttattaggattctgtcgttttctattattacatcgtctatttctcccaaagaaacaacatcgtaaccgatttctggatctatcactgtttttagcacttcgtatatttcttctttagtaggtttctttgaatcctttgaatccatagataacaacgttatactaatagcattaaaaattttaaataatccattaatagggttttgccgccgtgcccgagcggaccaaggggttcggcttgagaccgaatccccgataagggggcgggggttcgaatccccccggcggcggccatatataaagctatcgaaaatataacaccatatgcgttgtataaagattaagagatatctacctgcgattagaaaaatggtagcaatatatttatatcaaatgggtttaactcaaaatgagatagcttatttgttagaaacgacacaacctgctgtatctaattatattagaggaaaaagaggccaaatacaatataaagatttagaagaaaaatcagagataatcaaagagatggccgaaaggatggctaaagagaataaaaaattaaacgagatattatgtgaatattgtccgaaacttgttggttaaaaatttttaaacccttttattattgaatctcgggccggtagctcagcctggttagagcggcggtggccatccccctttaaatttttcttttcctttcgataatgtatactatagctaactctatcgcttatgctataattttcctatttttgatcccctatttattatataaacttgggatagatgttgaaaaagaaacaacaaagttttttccgttaatattaagttttttgttcataagggtttttgttgatattaatttgttgcccaatactttttttactgttactccaggggtttggattttggggataataacctattttattgcaaggaaaatccctataatacaatgggttttattttttgcaacattgttcgtttatgctttttatgttaatattgatataaaagttttggttttgttgctatatttttttggtttgtctttaataatattgtgtcctgtatttttaatagacaaaaaaattgctttggcacattctttagatatcgcaaccacttttgtgggtttaacctatttaggattaaaagagaaacatgttttgtcttctctaattggagagccattttttattggattctttaaaatggttgtattatatgtattattaaaaacctacaacaaaccatacataagggcttcgatttttgttttaggtttattaacaggggggagaaactttttgatagaaatagctttaaaatagcttttaatagccgaaatgggcccgtagtctagggggaagacgccgggttcgggtcccggagatcgcgggttcgaatcccgccgggcccagatatttttataaattatatttatgtaatagtagttaatgaactggccgtattggctggatttcaaagagccataccaaaatgagaaaggggaatgggtgtgcccatattgtaaggaaactttccctactaaagaagatgcttatcctagattaattatgactttaggcagttaccaaagattatatagagagtatcccgatttgagaactttccttgaagaacaatggcgctcttctgatggacatccctgcccccaatttactagatatttctggaaaagatataatgaaagatggaaagatatagaaataaaatcaaggctttctgaggaatctcaatcaacagaggaaattgagaaaaaagaagggattatcaatgatgcattagaaacagttaggcgcatatctcctgtagaaagaaaaccgatgcatagcccaacaacaaaaatagaaaagaagaaagggaatagaaaatatgaaaagagaaaagctgagaagaaagtagaagaggggaaagttgtttacgagagtgctggtatttcaaaagcagtaatagcaatagcagtagcattagcagcagtagtaggttttgttatacttaacaatgaacttcatattagcgataagatacttaaatactatagcgttttaaataaaaacaaaagcgttgcaaaaattgaacataagatggatatagaggatgtaaaaatatatccaagcgaaaatattgaagaacaatattctgaaaatgataaatatcccgaatgtgatgaatacggagaaaacagcaattatccccatataataccagcttgtaattacaaaggacacatctcgatagtgcgctttttcttattaggagataggtggtacagtattaaactaaatattagcaaatctatatactatggcgcaaaaaatggttttaaaagttatcgttattattgtataggcgatgcttgtatagaagaaaaagattgggaaaccaaatattataaagcatttattttcgacccccatcaaaaagacatattcaaagcaattatacgacaattagatttatattcatggagggatgagaataggtttgtagagctagctacatcttttgtacagaacattccttatgattatgataaatactataacaaatcaggaaatacaagatttccagttgaagttttagtggataataaaggagtgtgcggagaaaaatcccttctattagcaggaatattagcatatgctggctatgatgtagtattatttgaattcaaaaaggaaaaccatatggcagtaggcataaaatgcccatgtaagaatactttccgaggtacaggatattgctatatagaatcaacaagccttacccctatagggtatgttccagaagaatttataggtggaataaaactaagaagtaaacccaaaataataaaagtatccgatggaacaaaaatgtatactaattgtaagtatatcgattaccctcccacgtattataaaaatgaaataatagaaaaagtaagaaactatctagaaagcaattatgatttggtttacgaggaagagttaactagaagtataggaaaaaaatatttgcctcctgggtacacctctggtactacatggagaatccctattaaaggagggcatccagattttatattagcaaatttcataaaatgccatgtaaaagggaaatgtgataaaaatagatcaaaaggattagatgaaagtttaagtagatatcactattttggggtagacataattgaggaaggtggaaaatactatttaaccttattattagcaaattagctatttcattttaagatagctttttatatattccaacaaaagctttatgtcatttatctcattttttatatagtttatctcttttattagattttctattagttgtttctcagaatcttgcttttctaatatagattcaatttttttatttagtgtatctattttttcttctaatgatttgccattctcttcaatttttttataaacatcttcgatagttatctttttgctatcaaatagccccatttttattttgttattatttgttaataaatgattgagcgtaagcttaagaggggtttaagattagccaaatttaaagaaacaaaaatactaatttacgaccaattctctaaaaatatatatgaaatgttaaaacctatttatgaaaagtccagaaaaaaacttatccctatagaaggggaattcgatttaaattttgatggatatattcccataggtacagaggaagtagtagcatatatgtataaaagttttttcgaagacattccatttaataaaaaattagtttatgacaacccagcagtatttgttagatataaagatttcaatatggaaatgcccatgctttttggaaatgcctctttttttgtgaaaaagctaatagaaagaagagagaaaactgtgtatgcatctcttaggtctttgttagatttgattgatcttatttaacacaaattatttctctttctatccacatagacccacatctaggacatttagtggggtttagcctatcaaatacaaacccgcattttttgcattgggctttgtatattttgatttttttacctttcctttttagaatttttatcgatttttctaatagtttgtatgctagtttcaaatctatatctaaggttttagctaaatgttctatactaatgcaatttccatctattgcctctatgaattcttgtaatgttatattgtgcctcaacaaaattgctatgttatattctttaaagcctttttgcttaaaataaaaatgaagttttttgagaactctataaaattgggtaaaaacttaataataagcgatatccatttaggattggaagacacatataacatagcagggaaccaaatacccatattggtagaaaagctaatagataaaataatagaattgcaagaaaaaaccaaaactaaaaggctaataattaatggagatttaaagcatagcttttctccaataaaagaagagtttatagttttggattattttttcaaaaggttaggcgattatttcaacgattttattattattaagggcaaccacgataccggtatagattggttatccaaatatggcgatgttttggaatataaaaaattgtatggctacacaattacacatgggcataaaaaaatagaggggaaaaaatttattataggacatgaacacccaattttaaagcttagagatgaagtaggtgctactattagagtgaaaacctttttggttagcgataatgttatagtattgcctgcatttagcccttggtcttatgggaatgatatattgcaacatactgtaagcccgtatacaaaaaatatcgaaaattttagagctttagtttatttagatggggaattattggatttcggtagaattagtgaaatattaaaagcgattaaatctttttgaattttccaggttcgtattcatatatttctcccctagctaatagtttttgtatatgcttttttgcttcttctccaaatacttttactatttgctctaaagtagcaccatcatttatatcgatgtattccaaaattttgtttcgcaaatctctatcctcttgttctatgtgctcttttaaatattcgtataattgtttggatattttccccattccatcaacgaaaattatgtcttctcctactttgcctgcaaccaatacataatctccaatatctacatctgctttccttggatagcatttaatagtttcggttccatcatctattaaaatataatcgttcctctctatacaaatacccgctattaaaactttttcccctattttatttttagcaacttctatagggtataatttatacattatttgctgtattctaagggcctagcttctatttcggtttctctcaacattaatatatcgccaactctaactggaccttttacgtttcttcttattaatcttcctgcgtctttgccttctaagatttcaactataacctgggttacttctccagtagttcctgttcttcctactatctctacaaccctcgctgggtaagccttagaccaaataacagtatcgccttttacaacattagttggtatatcctctcttttctcggccattcgtattactataactatatttttaaaaccttaatgtaaggcctacaaaatgggtaaggttagactattagtacaaagaaggggtagaggttctccaacatttagaagcccaacccatagagctgctggaaaagttaaaataccaacctttgatggggatttagtaaaaggaaaagttgttgctttgattaaggattctatccattatgctccattgatggttgtaaaatgggaaaacggagcccaatcattattgccagccccattgggaatatctgtaggggatactgtatactatgggaaagaagcccctaatgcaataggttcaataaaaccattaagcgaaatacctgaaggtactaaaatatatatgttagagaacaacccaggagatggaggtaaattagtaagagctagcggagatttcgctttattggtacaaaaattaggagacaaagttatagtccaattaccaagtgggcagtttaaaacactaagcgcaaatgccagagctgttattggtgtaatcgcaggaggaggtagaaaagaaaaaccattcgttaaagctggtaataaatattattgggcttcctctagaaatagacattggcctgtagtcaatggagttaaaaagaacgcttccgaccatccatttggaggtaaaaggcattcaaaccattccaagccattcacagtatctaaatgggcaccaccaggaaggaaagttggttatattggagctagaaaaacgggtagagggaagtagacaaaatttttgctatagaaaacaaatagctttcattaaaatggtttgctataaattgcgctcctatgaatttgtctattgggtatgacatatgtgggagccctgctaaattaggaggtaccgttaatatatccattctataaatatttataggttttaagctttccaattctttaaactttggaggcaatataggcattgttggtgttaatagcaaatcgaattttttgaataatcttttatactcttctataacctttttcctccctattagagctttttcatagtatttgcctttgaatcctttggttcttaccaaagtgccaactaatattcttcttttggtttcttcacaaaataattctctagattccatatagaattcatcataatgtttgccttttgggtttacactatagccaaacaatatatttccatacctcgctaaattagtagaggcttcggccatggctataatataataactagctaaagctatatcaaataatgggaactctatttcttctattttgtattctttttccaactcgctaacgaaattgtaaaaagccttttctattttttcatcaacatctactcttattactccaatagtgaattttttatctatatattttataggctctttcaatccaacatttgtttgatcccttggatcgggtttggctattatctctaatacctttttcatataatctatgttagtgcccattactcctattttatctaaagaattggcataatctattaatccatatctcgatactaaaccataagtgggggtaataccaattaccgaattaaaagctgcaggattggatatagatcccccggtagatacagctatcgcaacatggttatcatattttttattgaacaaagctgtaaatgctccagctcctgaggaagagcccccagcaaccctatttgggtctaaagcgtttctcgcaactttaatacaactatttacaccaaaactaccaaaaccaaattcgtccatagcagtttttccaataattagggcattggccttttttaattgttcgctaacaaaggaatcatagggagggatataatcttctaacatcttactaccagcagtagttctaaggttttttgtaacaatattatcttttatagtaacaataaaagaagggttttctataagctcattattaaaagtaattattgagttggttttctcatctactttctttgcatattccattatttgctctacatccatgggcataaataagcaaaatattaaaaaatcagcagcggcagaaactcttcactaatcatggctcaagaccttcatcatccaattaataaataaaaatccatttaaaaaatatggatcctgaaaagaccgctatagtatacaaatttgcccagcaagtttatgaaaaattaggcattctattaaaagcagtaatattgtttggttctgcagcggaagaaaaagataaagaacaaagtgatttggatgttttactaatattagatgatttagcaacagattgggaaatggtaaaaccagtaatagagaaatatttagattctttactaaaaaaggaagaatttagcaaaatacatctaaatgctgtgacattatctttcttttggagagcaataattaaaagagatccaatagctattaatattattagggtaggaattcctatttttgatagcggtttctttagcccattgaaaaaactattgagtaccggtttattgggcccaacaagagaaactattttggattatgctaataaagttgaatatgattatggttcttatttgggatataaaattaaagctttggaatttttgtattgggtttttacccatagcgcgcaagcagctattatgttattgtataatgaaataccccctccaaaatatgttcctatgtatcttaaaaaaatggaaaacgaaaaaattattcctaaaccttatgcaaaatggtatgaagaaatatattcactaataaaaaagatctcacatggagaaataacaaattttgattcttgtttattagacaaatgggaaaaaagggcaaaaactttcgctaagaaaatggaagagattatatctaaaaatcttaaaaaggccctataatttttaaaatagacctatatttaatcgagtatgccagaggtattcatcgggaaaaagccattaaccaattatgtaatggcagtagtaatgcaattcatgcaaggcgcaaacgaagtagtaataaaagcaagaggtagaaacatttctagagcagtagatgtagcagaaagagtaagaaaaagattcttagctggccaagtagatgttggagacataaaaattgattctgaagaagtagtagacccagcaacaggacaaaaaaggacagtatcaacaatagaaataaaattagttaagaaataaattatttctttagatcaacgaacgctgtatctccttctttcgttactactattgtaaatttggttggtggttttcttccacctcttttccatatgaatttatttagctcttggctaatttttactattttcgcttttgtgtgtctcattacaaactcttttaatgcctttaccgccttttttgttcttttaaacctagaagtaactaatacagcttttcttaaatttacagtatattccatttaggaaaaaacaaagactatttaaaattttatatagtgctcaaagcttttattagtttcataatatcttggttttgctttttcattgcttcctcataattctttttcaactgtttatactgttttattagtttaattatatcatttacactattagcttggtcagttttattaattatagaaaccgcttcacctcttaatactttcgaagtaacatcatcgataatgttttcctctatttgaggataaataatatagtttattgatttttagctaacaaagtttaatactattaaaaagttattattgagtatttacttcggcttctccttttacttccgcattttcattagttaagttttctaattcttttagcaattgttttaacatttgcttttgtttttctttagcttcttcgaacgctttctttaattgcttatactctctaattaatttcaatatttctcctaaagattgggctttttctatttttgctattaggtttacaacttttagctctaactctgcttgtaaattagcatctgtaatttctatttttatgttagcgtgcaactctaatgttcttgccaacaaaacatctttagctaaagatactaaatccttcattgcttcatctttactttttaatactttctcttttatttctttaatttttttcctagcctcttctattttggttttagcatattcctttatttcttctgggggtttgtctaatatttgctttaactccattgaaatttctaaactggctttagcctctatcgcttttggcctatttttataggaagagtattctttgtataattcttcccatttctttaatagttcttgggccaatttttcattaattagagagagtttctctatttgtgcttttaaggagaaaaaggtaggatctaaatattgaccatggtattcttttactaatttctctaacatttttaatcttttctttatcatattcacaaaatgctctacatctattacttttgctaaatcctctgggttttctatatgcacttttccttcccctttattttcttctctttccttcatttcattttccttttctttattttctttttcagattcttcttccatttcatgttcctctttctttagttcctctatttcttcttcattattatcttctaatttttctagcattggttcacattttattattttagcattgtgttgtgatgcatatgttttagcaatacaatcgtttccaaaaactttttctattttttccccattaggtaattctagttcacatttaactggtttatatacttgtatgcaatatatttttggtttctttggtattggtatagttacattaatttcagcatttccctcgattttattattatcgccctttagttcgccttttagctgtactgcggacaatgctaaaggtatggctaaaacccagaatagctttttcatttttactaatataaacctaatttataaatagatggtactactttttaggatgatgtaggtggcttgactctgattagtgatgagaggaggtgatactgatagggtatttaacttttatttttccattaacccaaagtgataataatctaactgctgtatctcgtaatggcatgcgccattttttggataacttttctaaaaattcattttcatcttttgcttctatattaaaccgctcttgcaaatcctcaaaaattagttttattagttttaaagccactctaatagggttgtcaagcttctctgggctgtaagagcctattaaagttaacaactctttatcctttagagtaaaaatcccaggagtgtcttttaaatatattttatttgatagctttattaattggatacctttagttttccctggtataggagctgtaccggcaacgtgtcttcctcttaaagcattaattagagagcttttcccagtatttggaaaacctgcaacgcaaacaattattttgtctttattaatatttttcgcaacctcttttattttatttcttaatactcttagcccttttcttgttctagaggaaacatacacatcaccatataaacttaataactcttctgcttcaaccaaatcggctttgtttaaaactttaattattattttgtttagtttttctatttttttgtttggaaatggtatcctagcatccattacttctaatattatatcacaatcatcaaacatcttttttagagaatatgccccttaaaatttttagcgaaagaggtatggaaaaatcataaatctttattgttttcacattgggttttttaattctcgttttaactaactctctaatatttctcaaatagggcacaattgttttgggtacatatttctcccataaatcgcaattagataaatagcattccctaacttgggaagcggatggtccattatatctattattaactattaattgcttagcaaaatagccataaacttttcttttaatccaattgtttccccccatatatactaaatcgaattttttcttttgttttagtacatctatataaggaggctcaattagaaaaaattcgtatttttgtcctagtaattcaaacatttctttttgttcttctatcaaaaatgggtaatccttatttattattggttcaccattgggtaaaataactcttactggtaaaaatataacttcgtaatcgttagataatttgttggcaatattgtaatgtgatatggttaaaggctgaaaccgaccaggaaaatataaagatttttttaattttaagctaagcatttacatattgcttgttaaaatttaaatgctttgatggcaattagttattcaatagttgtatatttgccaaaaagccaaaatatttttattcttaatgaaaatcgatagagaatagcaaactaaaactaatacgatttgttgatataatttaagaccaaaaaacaataatggaagtttaaataaaaatttagacgttttaacatatttaaatgatgaactattaaatatgtatggtgctcttcgactggggtacatacaatggaggaagcaagctatatgttgcagagctattgggaatgaaactaacagaaataccaccatacgattttagcaggagaaatagaccaatagagtattttaagcaatacaaagaaaaagcaacaaaagcgtttacaacaataactgcccatgccccctattattcattaatcccaagggatttaaggcaattagataaaatcaaaaaaataatgttagatgtggcaataaaagcgaaaactgctggggctgaaatattaaacatgcatataggaggcaaaactggagacccagacaaagatgttgaaatagtaacaagtgtattaaagtatttgttacaaaataccaaagacattaagttctccttagaaacatcctattctggttatctatttggttctatagaagaaataagggcagtaatagaggcattgaattcggatagagtattaatatcgttacaattagaaaatgattggatgagagaattcgaagtatatagaacagggcaattccataaagctgcacaatatgccacagaggatttctggaaaaagatattgaaacaagggttagaattgggtaacggttatctatccctaaggtttgcccaaataactggagtaaggctaaggggaatagtagttaaaaagagagttccattaggaatgggttacccaccattagagccattggctaatgccatagcagaatttatggtaaaagaagtatatgaaaaaggtttagaaacaaaaatgcatataatatatacaggtataccacaaaccaagtatgttgatacccttaaattatattcctcaataatggaaaaggtagtaaattatttgagatgattttaagagaataccaaaagaaagctgtttctatagccttagagaaaaagaaatgtgtaattgtattacctacgggcactggtaaaaccattattggagcatattttgttaaaaatttattggataaaggcaaagcaataatagtagttcctactagaattttggttgaacaaacatacaatgtttacaaatctttaggattgaacccaacaaagatttatggtataatcccaaaaagcaaaagggcaaacctatggaaaaaagccaaaattgctattaccactccagaaactgcttattttgataaggaatatatagatcatgacataattgtattagacgaatgccatcacgctattggaaatgactattatgctaagctattaagagagaaagagtttgaatataaattaggattaagcgctttcattcctaaaaagtatagaaaagaaatagaatccctaataggggaaataatagagttgtatgacgaaccctctttaaaaaaatatatccctaattggattggcgatatatatgaagcgcctttgaacaaattagaataccaattatataaagagattgaagaattaaagagaaaatccaaaggtagcaaaaggcttatatatagcttagctttgaagtatttggcaacagatggaggtttggcattaaaagaaagtgtaagcaaaaataatattttatctaaaatattgagcccattcaaagacaaaatagaaaagattagggatttacacaaatgggacgctttaaaaagtatattagatacatacgaattcgaaaaagccattatttttatagatagggttattgttgcaaagagagttgcccaatcattagatgcagccctaataatagggaaaaagcataaaaatatagcgcaatccttgaaagaagcaaaggaaaaaaatataatagttgctacctctgcaggggaggagggattagatttaccaagcgcagatctattaatagtatggtcccaaacatctaatccgataaggtttatacaaaggcatggccgaataatgagaccaacaaagatgttaaaatttgtaacttatatagttactccttatacaatagatgttgatttatttttgtccgcggtattgaaggtatcgaaatacgttgatataaatataaatgtgaaaaactatttcaaaaaaagctctgttcatcaaataataaatctattaacagagccattaactaaagatatgttaaagcaattgggatttactgataacgaaataaatattgctttaaaatatggaatagaaaatggggatatagtatacttttattcccctttcggaaaattatacatcaataaggactttatgtatatggttgagagacgatatccaacaattttcataccaaaatgggagggcaaaataaaaataaataacaaaacaataaagggagattaccaaaagctatatgaaaagctatccaatatgatcccaattaaagggctaaaaataacagtcataaaaaagaaagacataatagaatatgattggagatcctataattatacaattgatagcaaaccattattaaggctagttttaaggaatgctttgtcttaatgcgcccgccgggattcgaacccgggtcacgggcttggggggcccgcatcctacccctagactacgggcgcttggtttatagagaatattattaaaaaattttatctgcagctactcctttcatcactattcagattgtgctttctcttcatatagccattgcaatttgcctagccctgcttgtctcatcgttagattaatctttgtacctatgggttttatacttataccaactatttttgctttaactatatcttctatctttagtatctttttagtttttctaccagccaaaactttgtctttagaataatcaacgatatcatccattatttgagatatatgtattaaaccatctgtaggcccaatatttacataagcaccaaaatcgactatatttgatataattcccaaggttacttcttttaatatgggtttccaggttaaaactttaaaccttactttataatatattcctccatcgttatagcctaaatatccttcacttttgtctaaaatatctaaaatagataaaacccaacctaattgtttatttattttcccttcatattgctttaataatgcatttttaattgcttcttcgatagttttttcttttaaatcccttggatcaactctaacatagtcttctacctcgcttataaaaaacattgaatagcaataaatttgtttttataaatttacaatggactgggaagagctggaaaagcaaatactaaattgcaaaaaatgccctttatataaatatgctagaaacaaagttattggggatggcaataaaaatagcgatatagtatttattggagaagcccctggggaagaagaagataagcaaggtaaaccttttgttgggagggcaggccaattattaaataaattgttagaaaaaataggattaacgagggatcaaatttatataactaatgtattaaaatgcaggcccccaaataatagagatcccaaagaagaagaaatagaagcatgtaagccctatttagttatacaattagatttaataaagccaacatatattgttactttagggagattcgccacaaaggaaatatttgatttgtttggcctaaagtttagctctataacaaaagtaaggggtaaaccatattatgttagaagatggaacaaaattgttacgatattccctactctacatccagctgccgctttataccatacaaaatatttgccaattatagagcaagactttgaaaaactaaaagagataattagcaataataaaagagggttgttaaagtttatctaacagattcaaattgttgtaatagcaataattcctctgtagtaattggttctcccctcattagcttttcgtctatttcttttattttagatttaaccgcttctaagtctatttcctctataggcaatggtttgcccattgtcatagccaacatttctaatttcttttgtatctcttcgtctgtttttatgtattcttgtttaaccttagtatattgatcttcaatttctttaagcctagctcttaattcgtctaatttctttaataactcttgcattgtttctctaacttttttcttctccattaatgcatctcttattctttccttgattatatttagctctttttgtttttcaattaattgtctatttagctcttcaaattccatcgcaattgggttttcttgaatttccattaactttttctctaattttcttattctttcaattatttctttttcttgtttatagctcaacacttcggtttgcaatattctttccaatatttcaatttccctcctaattttctttggattaacatcacttggtaattttttcaattcctccccatatttttcgtttatttcgcttaatcgctccctaatcttttttatttcctccaatagtttgtttttctcttccattaaactatttaattcttcagttaatgcttgttttttcgcctttaactctctaacttttgaaacatataccctaatctcttctttcaaagctcttttttcttttaacaattgctccctctctttgtttaacttcaataacttccttctcagaaaaataatttgtcggcgcaactctgcttggccaatactcacgacgaataagagagaattttatttaaaaataccaatctttaaactacttttccacctttatagcccctgttgggcaggcattagcagcatcttcagcacaatcaagtttatccacttctatagaggcaaccccatctttatataatgcttttactccatttttgactaaagcgactttaccatcttcatctggtacaaagaaggtggaacaaatcgcatggcaagccatacaaccaatacatttgtttttgtcatgtattatgcgtggcatttataattgggattattccctttatatgtgatgaaagcgtaccccactgattagtgatgtgagatgcgcgcggctgacactactttttagttacatgttgtaggtcaaaggtgtccaaaaatttcactaagaaaaaagggtatacatatcttggtttttagtggtatgttaactgttatatacacgttaacagttaacgttaacgctaccggaataaaacttgtgattcccaaattcttagtgaaatagtgaaattgcttgggactttcggttagagacgtcgcactatatagtggttataacggcgaaatgtcagcctttaaactttttataataaaagctctaatggcctacaataagaaatatgctgattggaaaagaaagatatggtttactataaaagcgccagccatttttaatgaagtagagttaggcgaaacccctgcatataaaccagaacaagtaattggtagaagagtagaattaaatatggctttagtaacaaataactatcaattgcaaaactataagggaatattcaaaataacaaaagttgagggaactactgcaaaaacagaattagaagggattaaaatgtatgaatctataatacaaaaatgggttgaacccgggagagataaaattaccgactcctttgtaataaaggataaagacaatagattagttagggtaaaacccgtattaataaccaatagaaggttacatagaaagcaaggcaccgctataagaaatatatggagaaactattttgtagagttaggcaaaaagttatcttttgaagatatggttatgaaaatattaaacaaagaaataccagagcaattgaaaatacaaatcaaaaagatataccctccattgttttttgctattaggcaattctatttagagccaagagagaaacatatactattaatagaatgaaattcttagagaactgtaaatatactttaaaaaatgctatttatccaaacaaaaagcaatacttttttgctttaaaaatatcattattaataatgtctctagttggtggtgtaggattcctaatgcatttagtattcacattcttattaaaatatctataaaattctaagtgagggcagtaagctgggttttaggtttagtagtagctatagttttatctttaattagcttttttattgtatctttcccattgcaatattctggaaataaaggattgccttatttgttatcgcccgcagagaaaacaatgcaaacatttacactaaacgaatcctattgtaatattctatgtataaaatataaagcgggacaaaatgttgataaaactttattagaaaaatgtgagcaaaaatataacttaggttgttacaaaccaaacataaaacctatagtttttgcgaaacctgtgaaaaacaaagcattatattgtcattgttatgtttatgaacccaatactaaaccttcgtgtactagtttttatgaatctgtcaaatctatattggaaggcaatactattagtgtattaaatgtagaggagagagattgtaatgaagtttgtgtaaactttttaaaaacttattgtgaaacaaattctggtgattgttctatggcaaaccaatgtgtgtatgtaagataattctttaaactttatatatccctatacggaatggagttttgtccaaaagatggatctatactaattcctaaaaaagagggagataaaacctatttggtttgccctgtttgtgggtataaaaaggaagtaacctctttggttataaaggaagaagttaagaaaaaagaagaattaggtaaaggtattgctgaaaaagaaacaatctattccaaagccaaaggtgttaaatgtccaaaatgcagtagcgaagaagttgtttactttacattgcaaaccagggcaagcgatgaagcagaaactatattttacaaatgtttaaaatgtggttacacttggagagagtatgaataatttttaaatcgtttcttttattctattggccgccgtagctcagcggtcagagcgcccggctcatagcatgggctatgagctctgacccgaaaggggatgatctcgggggctcttatgccccctcgtgagaaaccgggaggtcgcgggttcgaatcccgccggcggcatcacaatttttatataaacctaaccaataatatgaatggcatacaaaatagaaaaagataaaataaacacaaataaagaaaagagtattcttaccgaaatagaagaagttttaaaaacaataattagagaaagtaaagatactccttatgccctagttactgctctttcctcctttattctgattttctttattatatttggttctgcaatttgtaatttgtctaatttaggaaaagattattgctggttatcaattgttctgattatattgtttaatatactttttgcttttataataacacttaaatccatacaatgtaaatgattaattaaaatttaataattggggataatattgcatagagatattttttggttaaaacattctttacgaacaaagggttctctcgataactaaagataaatatatacttcctgtatcaagagagaaatcaagcacaacagagaggataagaaaaaaaatactatagtgtagttttctatgataataatctgaaggccttatcaatttatcaattattgttggatcaaccggggaattaaacctaactcccagaatgtaacaaattttaatattgtcaccatgttatgtactcaattaactagcatcttctatttttattgagtttctattatataaccaatcaataaactttacttatatactccaggtctaaagatttgatatccattatatagattttataaatctatctcttcatctttatttaatacaatcgcttctactcccttttcttcggcttttcttttaaattcgtatggatcggctttaattattggccatgtattataatgcattggtataactatttttggtttaagcaaatctattgcctttagagcttggtcaatatccattgtaaatacccccccaataggtaacaaagcaacatctattttaaatagctctccaattagttccatatctttgaaaaccattgtatctccagcatggtatatggttttatttcccttaattacaaaccctccaggatttcccaagggataagcttttccattgtaatataaagtagagctgtgcactgcaggcactaaactaaccttttctccaatatctatagtgcctccaaagttcatgcctatgctttctatattaaattgcttaacgaattctgctatttcatatatagaaataactttggcattgtttttcttggcaatctctatagtattaccaaaatggtcattatgagcatgcgttaccaatacataatctacttcaggtattgtttctatgtatggatctattattagcctgttcttatgctctataataaaagcgctgtgtcccatgtatttgattttcatagaatagttattctaaaccattaaaatatctgagcctctggcattcatcatttctcagcaacgacaggactcttcacacaaaatattttttaatccaattaaagttttattctaatggatgtttctacccaaaggaggatggctgctgaaatactaaaggttggacttgatagggtatggatagaccccaaccatttaaaagaagtagcagaggcattaactaaagatgatattagagagttaataaagagagggataataaaaaaacttccaatagagggccaatctagaaaaagagctagagaattgcatgaaaaaaagaaaaaaggtagaagaaggggaccaggttctaggaaaggtaaaagaactgctagagcagatccaaagagacaatggattaataaagttagggctcaaagaaagctattaaaagagctaaaggaaaaaaagattattgataacaaaacatattgggatttgtataagaaagttaagggtaatctattcaaatcgagatcccatctattgttataccttaagcaaaaaggtatcatgtgaacctaattttattagctgaaatattattttctttaacctctatattttttgctgcccttattttaaaacctttccttgtatttaatatatttgctacactttttggcaaacaattcgcttgtaaaagctttgctaatttaaatagctttttagccccaattgttatattgccaatcccagatgtttgctacaattctgctatttacaatttagataatatgaaagttggttgctttttgttaaaaaaagatttatctgatatatacaattattaccaaaaattgtatggacaatgctctaataataatgaatggcaaaaactttatttttcttacataattgcgagaaatattgaggattgctataataaatattatggtttacatgtagaagacaaagcccatactaatgtgtttccttgtagtaatttgtttatttatagcaagaatcctatagaaataactccaacagatgtcgttataatactcaacaaactaaaaaaattagaaatcaattattttgatttagattcaaagcaaacaattaaactatacttcaatccaaagatagaaattaagggagatgtggtaataaaaactgataatgaaagtataatttacaaaagccattatattaatggaaaaaaacctttatatttggtttttgattctaaggattttaatactaaagaaagaacctttttcataaaatccaattcttatgttctaataaattattatgacaatgagcaacaaatttccttagttgaaaaggttgcagctgcaaaaaaggtggaaagctttttttctaaaatagaccaaattttgggatggtttgtattattagctatagcatttataatagtgttagttatattaagtgttccaataggggtattgtctgcattggttagttcagccccgacaattttaaatataattttaaatttaagtaaaaaaattggaaaaataatagcctttataaaaatagcgattgtgatagccgcttttctatcgccaaacatagcaaaacttctattaggaattgatgatagttataaagaattgtttaaatctcaaacaggactagttagcaaaattaataaacctgtgataggagtaacaacccttattcctaaaaaagacgataccaaatggtttttgtattcggtattgcataaatctatacaaaacctatttgaaaaaaaagacataattttatcgaaatataatattagtgtttgcaaaataaataattatagtacaatatatcaaggtagagatataaaaatatattgcaacaatggttgttcattcgaaagcaaaaccggtaaaccaattaatgccaaactatttataatagatgaagctccaaccagtgaaaaagaatacggattgtatctttctagggggaatatagcgattttattagatccatcttacccaataggagagaaagacgtagaaaccatcgctctagaacttataaagggctttaaagcaatatattgttaaaatataacatgtttataacgtatgaaacttataggtacaggttggaaaagtccttctttaatagatgtgcacaataaagttacttttactctatggctttgtgggtgtaatttgaaatgccctttttgtcataactggaaaatagccgaaaaaatagggtgtggagaattagatataaatagattgttagacgaattagatagtgcttctttattaatagattatttacatgttactgggggagaacccttattgcaatgggaaccattattggaattgttcaaaacctcttacgaaaattataatgtggaaaacagtttgaatactaattttacattaactatcccattaaagaagcatttggattcgggttatgttcaccatgttgctaccgatctaaaagtgcccccaaatgaaatgtatggggtagaaaattggaaagccttatgggaatcctatttgaaaagcctttctctaatgaaagaatatgatatccccttagaattaagaattcctgtttcgagattcccatgggaagaaaagaaaccatacatagaccaagcacttaaagctttaggagacgcaaacttctatgtaataataaacccattattgaattacccagttgtaaatcctagaaacaaagaatggtgtgacaagcattgttctcctcaaaaagaagaattaaatataataaaagactatttagagagccaaggaataaaagtttatctaaaagggcacagcgaattaatatagccggggcagtggggtcgagaaccccgtatgctagacctggctacaccacgggggcagtgataaaatttaaacccatttaaaaacattaactaatgatagctttcattagcgatttgcatttgggcaatatttacgctaataaaaaagagactgaagagcatagctataatgctttggcaaaaatcgaagaaaagctattagaataccaaccagatttagttttggttggaggggatatattcgataaaaacaaagtctctggaaaagagattggggtattcatagattttattaataaaatgaataaaaacaacatcggagtagtaagtattagcggtaaccacgatggcaaatattggttaaaagaatcattcgatcacgctattccctatattttatacaaaagcggaattaacccagagaatggttatgaatattactcttttgctggaatttatttaaaaaattcgagggattggaaaaccctttcaatgatagaggataaatatgatatctctatagtagggttttctttttataccaaagaccgtttaccagaattgtatgagtatttgtctataattgatagggaaaaaagcgattatattttactaatgcaccaatctctcaaaagtttattaccccaagatccagcagcgatagatttaaccattgagaattacaaatacgctttatttgggcatatgcatatgaagtactataaggataaaataatagtaacacccccaccatattctatttcgttaaaagaggccaatactgaaaaaggcttttggttaatagataaaaaacccgtttttgttcctatagaggatagtaggccttttattaaaatggctattgatttagataacccaatagagataaagccaaacaaaaatgccattttaattttagatgtctattatagagaatctcaaatagacaaactaaatctattgaagaaaaccttatcggaaaactttttgtatgttaaaataaacccaatattgaaagagactagcaaaattattgttaaaaagagtgaaaacaaggaagaaatatttaagaaatatctaaaagaagattatgatttctttatggaattatatgaaaaatttagagacataaaagatccagaaactattgttcaatacctcgaatttttctatcgatgacatttttattagattgtaacaaaactactctcgaatctacatgttcatcaaccaaatcgtaatctatatattcgcttaattttttagcgaattcttttacttcttcatgtgtaggcatgttttttattgttagtctttgtctcgaataacccaataacataaacgcttttacttcaacaaaatggggattatacttttctattaaagaggcccaaccctcaaaatctgtatcatttatacctttaattaatgttatcctcgctacttttcttgttttagcgtgcctcattagttttaagcttttattgaacctcttccatgcatcatttaacaatggtttagatacttggaaaaacaattcttcatttggagcagtaaaagatatatagaattgagtaggcaatgcatttttttctattaatttttctatagtttcataaactaccccatttgtaactataaatatactcttaagccagtgccagctcttttttagatacaatatagcttcgtccatcctaccatataataatggttctccaattaatgaaaatgtaacatggtttggcaacaacgcttcttctaacatttttttatccactttttcattacctttaaaacctattaatagctctgctcttagctttcttagattttctaacaaatcttttggatcgggccaatcttcattaagcaaatctatatgccctttttgaaattcgtgatttggcctccaacaatagatacatctattagtacaccaaaatgctgctaaagatatttgcatacatctatgtgtgtctattccatagaatttgtttttgtagcaaaatcttttgtttttcaaagcttctttagtccaatggcatatttctactgctccagttttgtaaactctataacccgctttttcatacatttcttttattttttcatcaacatataacacctgttttaaatggagtacccatttataaataatgcgcgtaatagtattcttcgtagagcctgagaaagttgataacataggagcaatggcaagggtttgcaaaaactttaatgcagatttatatttaattaacccaaaagtagataactacgaaaaagcctttgttgtagcaaagcatgcccaagatttattgcaaaaagcgatagagaataagctaaatagtatagatgaagcaaaagaattagttgatataagtgtgggcactacaggaaaaatagctaacgaatacaatgtattaagaagccctttaaaaccatgggaattagcagagaggtttgccaatagcgatataaaacttggtatatttattggaagagaaagcataggtttaactaatgaagagctatcaaaaatggattttattgttactattcctgcgaataaagaatatccaatactaaatgctacccatgctacagcaataattttatatgaattattcaaacattcaaaagaagggcatgttaatttagctttaccaaaaaaagaacaaatcgatgttttattagattatgtgaagaaaataattgataaactgcctcaaccagattatagaaaggaatattattttataataatgagaaaacttattacgcaaggcataataaatagcagggaagccaatacattaattgggttttttagatctatatatgaaaatctcaaatgaagatattgtgtgcttctgaactaatgatgaaaggagcaggaacagattattaaatagtatataatttttccctaatgaaagcagcagtagcgtgttacgaaagcaatggtgtgtataagctattcccaacagagtttggccatgcccccatatttgtaatagtagacctcgatacaaaacaaatagtagaaaaaagggaaaacccctataagggagaagaatccaaagataaattcaaaaaattagccgaatatttgaaagatgtggattattttgtaggcaaacaatttggtacatctgttttgaaattaaggccaatgtttaacaaaatccccgtagtagttaatgccgaaaccttagaagaagcaatagaaaaactatctaattcgaaagataagctaaatttagacagctatgttattttgttgtagtttggccaattcctcttttaattcgtcttttattttatcaatatcatttttaagtttttcagcctctattttcaaagaatccaattgttttgccatcttttctatggctttgtctttgtctatttctacataatacttagctccaactgggacaataactttgttcgtttcttttgcttcccctttgattagcaaaccattaaataatattaagccattcccatctcttagctcttttaaatattctatagctaattccaattccgctactctatttagtattacttcatattcctttgtaagctcttcaaagagcaaatacttttctcttagatccattaagagaataagccttttcttttataaatggatttttgtctataatctatccatggcatagagccaagagaataccaaaaaagaatattcgagaccgctaaaaactataatacattaatagtattgccaacaggtttagggaaaacagtaatagcgttaatgctaatagagtatttcaaacaaaaatacccggataaaaagatattgtttttagctcctacaaaacctttggttaatcaacatgtggaatttttaagaaaatatagcgatatagatccaacaaaaatagttggtataagtggggacataccaaaagaaaaaagggtaaaactttataatgccgatgttatagttgcaactccccaaaccataaaaaatgatttggccaataacttaatagatttgaacaaattctctttaattatatttgatgaagcgcatagggctgtgggtaactattcttacacatatatagctcgcaatttcaataatagaattgtaggcctaaccgcttcccctgggagcgatgaagagaaaataaaagaaataatagaaaacttaaaaatagagagaatagaatatagaaacgaagattcctcagatgttagaccttatgtaaagaaaaaggttataaaatatatcggggtagcattagacaaagaaatacttacagcttcttctcttatacaagaggcgatagagataaggaagaaaaaattggaagagcttggcatattaaagagaaaaataaaggatattgctttattaatggaagagctaaagaagaaacaagcttatagcttagatgaaagggtaaaagatgctataattattggttctgaaattttaattttattccatgctttgaaaacattgcaaacccaaacatatagagcatttcttaaattttgtgaaaacctcttcgaaaatgcccagaaattaagtgaaaaaaatgttgccgaagatgtaaggctaaaaaaagcatatttgtatgttaaagatttagttaaacaaggcaaagaacatccaaaaattaatgctttgttagagataataaaaaagaataaagacaaaaaaattatagtttttgcccagcttacagatacggtaatgcagataactgaattattgaacaaaaataacataaaagctgtagcgtttactggtaaaaagcttatgactcaaaaaaagcaaatagagactttagacaaatttagggctaatatatataatgttttggttgcttcttctgttgcagaagaagggttagatataccgaaggtggatttagtaatattttatgaacctattccctctgcaattagggccatacaaagaaaaggtagaaccggcaggttaaactacggtgaagtaataatattgtattctaaaaatactttagatgaaaaagctctttgggcctctattagaaaagaaaaaaagatgtatgaaatattggaaaaactttctaaagaggttaaaccaaaaaaagagcaaactttaaacgaagtattgggatttagatataaaattattgctgaccaaagagaacaaaattctttagtagtagatgcgttaaaaaaattaggtataggggttaaaattgagaatttagaggttggcgattatatagttggcgatgtagtaatagaaagaaaaactattagggatttcgttgattctataatagataataggatatgggatcaaatgaataaattatcgcaattagataaaaaacttttaatattggaaggagaagaagacccatattttattagagatgttaaccccaatgttataaggagtgttatattaactttatccttaaaagggataccaataataagaactaaaaaccctattgatacagcttattacattaaagttttgtctgaaaaacaaaataaactgccacaaatacctaaaataaagaaaaaagaactaactcctaaagaggttttagcttcttttcctggtattggtgaaaagagtgccgaagagctattaaaaagatacaaaactataaaaaatgttgttaatgcttctttatcgggtttatctattattttgggggaaaagcgtgctaagaagcttaaagaatttttagagaaagaatatcagtagtgcccatcactcttcatctctctgggtagccgtatgtcatcatttgtttattatagagccttctgtatagccagagaactttataaagaatggttgtactcttacattcgatagcttcttcaaagcatcgaatactgcaaatacatggttcattttagttttggtcttaccgaaagatctaacccaaacatcttttattccggccaatctaaatattttctttatctcatcgtctgcaactattcctactccctttggagctggttttaatataactctaacacttccggatttgccctcaacttggtatggaatagaatggggagccccacaagcacattcccaagaaccacaacctctcgcaacttttattatatttagtttagctctattaatagctttttctctagctatcaataaatcggagcttcttcctaatccaactccaacatggccatctttgtctcctactatggcaataacttcgtatctcgttttattaccttcagcagttttcttttgtgccattctatatggttttttagacctaaacttacctcttattatacgccatttcataaattcaacctctaaatttggtaacaatacatcaactatctctggttctctaataacatatttattagataatatctcatctatatttgttattttaccctctttgactaacctgcctaacttggttttaggttgccattcctctatattaaccattggagaaaaaacaataatttatttaaaaccttatctagtgatttgcaagtttttcaattcttctaaatatttgttaccttttccttctaagaaatattttctagcaggctctaatatttctattagcttttctgctacatactcttttaaatctaatggatgtatttgctttttagcatacgcttcttttaattgttcgacattatcaaattccattgtttgatgggtttttttgttttctattactatgggctcttttaatattggatatataacatattcgaccaattctattattgggtttagctctatttcccctatggggcaataagcctttctaatttttctccttatatcttcgggagtatcatgaataaatattgcagtctcgggtttagatttagacattttgatatctataacactgtcctcaaataattccctattgtttgttttcttagcctctaatagtttttgtctaatattctcatctatatgcattcctaataataaatgatggtgtacagctatgggcttataaccaaaagcatctgaaacctctatggctataacatgggccttcctttggtctattcccccatgggctaaattaacatttaagctatatatatctgcaacttgcataggcacatataataattgggcgaaacttattgattctccttgctttcttcccataatagttatgccctttttaattctatttaatgttgtgttcatagagatttttattatgttttctagatattctatacccaatttctcatacaattcagagcctaagactacttttacttcgtctgggtctcctcctacagttttaagcgaaacctttaatgcttcagcgaaataacctttcgcgacttttcttattgtttctaaatccccgcctaactttttattaatccatgaatggtaatccgctaaaaataaagtagttttaactttggctttttgaaaatctctaacttttagcatagaaattattcctgtgcctaaatgcacaaaaccagagatttcaaaaccaatgtaatggtttaaatctattccttgttctaaatattgctttaacctatcgatagtaagaatttcttctgtgggcttttgtgcgatgaggtttattctttcttctatatccattattttaaagcgaatccctaatttaaaagcctttaaattctttatatattattctatggcaagggaccggcggccgagaggtgtaacctatgactgtcccgtcagggataggatgaataggtcccaccgcggccgtcgacagcccggcacgagagtccccgagtgagaaggctatggccgtcgatgagctcgggtgttagtgtgcgggcaacactttttaaatgttatctttctttttccccaatgaagagatctagtaggagatggaaaaaatatatgcaatctcgatggaaatggcagaaaaagagaatgaggagagaaaaacgtaaaaggaggatgatgaggagatgaaattctcactaaaggttttagttatattcctttatagtgcttttttaataacatttctcgatttgtatgttaactatctaaagggagaaacatttagatatatattttttgatttggttggttatcatatatttccatatttgtttgttttgatagcgccttggttacctttaattattttctacccggaaaaactaaatatatggattgccggaataatagcgagctctttgattaacgatttggtatggtgtatattttattcaatagacaattgcttatatagagaatttctttcaaacgatatatggatggttttagatatagggataaaaatcaaaataccggggatagcgatgctattttttagtatagcgagagttttgctaataatttatttaactagagagtatctttttaattttttcaggcaaatagtcaatataaagtttcccattaacaaacgcataagggtatagctttttctctaaatattggttatacaataaatactttaccccaactttctttaattcttctatcgaggctttctctatatattgctgcaattgatatacggcataagcttcctctacttcatttaattgtttgtctccaactaatttggcaacccttctaaaatcttcggggctattaacatataacctcgctcttaagcagtaatctccataagcttttagtatggctaatttagattgcccatctaaatgtttcaaagcacactttaccgaatcataatcacatagtttagctttctctatacagcttttagttatttctattttggcctcttttggaagtttgtcccagcaacttacacaacaattatcaatatttttagcatggccttttattttgaatatcgcatcatataacattttataagtatcggaaacaacatttgttattttttctaatagtttttgtatatttcctattaacccattaatgaaacctattgaatcttttaacaaaagcaacgcactaactgctcccgctccaacaaatggtattgctgctgctcctggtattaatacaccaatggcacactctaatatggggaaaactattttagctaatatcattaacagggaatttactatatataatacggctaatatgtttgctaacatgtatgcaatatctattagcgaaggcattttaccatctctaatattggctatcaaagaatctacttcttttttagatttgcctaacatcgcatttatttgatctatttgtttttccatattagaattgcccaaatcacatagatacaataaaccgtctaatttgcttacatctatgtttgcgaaattttttaatactctctctatttggtctttgttttctccaaccactttggcatagccattttttacttctaatgacaattggtataaatataataagttctttttacattgcgataatttattataatcgaacctatttttataatagtttatcaaaaagttgaatagcttagaacaggataatcgcgttatagatgtgttatcccaatattttactattaaatcagcaactctaattagcttgctatctaatgaaggatgttggtagaaatcatacaatatggccatttcattataaagctcttccgctttctcccttagctctgtgctattgttatattgtaattcttgggcatattgtttatacacagattttacatattgataagtaaggtttgcggcttctttgacatagtccaataacaagtttttctctttcgagctaaccaaataagaataatataaaactttgtttaaccacaagtttttgttattgaattcgtttatctctttatctatttttttcgcaataaatgatattaaaattaagggatttgctttatctcttatatcgtttactatattgttagcgcatttgtaaacaaataaaaacctataatcgcttgtatcaacataagttacttgtttgtgtttagatattatccaaattgagttaaaatatacgttaccttttccagtttttcccttagttcttaagaatttattactattgctaattatatattggtagttagacccaaacccaaaatacccggcaatatctttattacaactacttactttggtgtttaagctttgaacccacctttttttgttttctacataattatataaatcatattcataacctgcatattcttcatcgccagcatatacattgtttatattagaatagcattcttttaagttacagttacaatttaagtctgtattgttatcattggaagcccaaccataattactatcatatttgggagtaactatagttttaattttccctacattgtttattatatcgtaaaattccttcatacggctttttatattagaaagatgtgattttagttgttttaaatcgttctgcgctttgctaagcaaattagatagcaatagcaatattattattaatggtgccatcgttgttacataatctaaacaaaatctgctcgcttttattttaattttggcttcatactccaatgggggtagttctatttgagaatcgaacctattattaaaaacatacgatggaacagttatagacattttttgattaacatttattggattgttaaaagagatagacaataaattattaccaaaattggatataatagaacaagcacttcttgctatgctctctattatcctatttaatggtatttcaaaccgaggaatacataccccacaaagaaatggaaaattaaagaatatattgcctattctataattgaactctattcttttatttatttgggcgtttacatttacattggaaaaaccaacattgatcggtttcccctctaaaggtttattctctattatcgatttctgtatttcttcgcctttcgcttctaatattgttttgcccctttcctctttggaaaaagttttataatacctattcccaaatatgttgctatctaaaataaggtttaccctaatgtatggccattttattttgtatttttcattagggtttacatcattgggagtgcctgttacataaactattggttttaaacctatatttgtgttaaaattaattttgggcttaatatttagattacatactatgtttatccatgggtttgttccaattaatgaactatatcttttttctatttcattaggctttgggggcaaaggataatttagattaacccttggattactatttaaagcgcttttcattaaatttgggctaacaaaattaatcggtatattaatatttggcttaccaggattgacattgtataaaccagtatatttatatgtattggtttctatgtctatagataattgagatactgctataggagtaaatattaatagtgaggccaaaaagtaatggcgcacagatgtataattagattttatttaaaatttattgtttaaacacttgcataacaacaggtacacctaaatcccacactataacattggccccaggttctactttgtcttttaattcctctggtactttagcttctataacttcgtatgtttccaaatccattacttgtgctactacttcttctacttctccttgtggagaaggtactttccttttttctgttgctattatttggcctttaatttttttgatttggggcactttaatagggtcgcttgttggtttaattattactattttcttaccgcttgtaacgctaattgcctctattcttgcttttgcagacccatgctttcctggtttggatgtttctatagaaactattttatatacttctccatcttgttcgttgtatatataattgccaacctttaattctccaacctttttaacaataacttccatttctcgcatagaataaaagttttaaaaatttgttttccttctaaatgtgaaagctatcctaaaagatgttacttctttagtttctaattttaatagcaaaataatacaaaaatcattgaaagaagggaaaagggcttatattatagttttacccaagtttgcaggccttttaaaatatgaaataggtaaaaggagggttgctaaagaattggtcgatgttattaaaaggttaggcgttaaaggaataatacatagtgacgaattgcccaattacggtataaccgaagaaaatgttaaacaaattagggattttttaaacataaatgaagaggacgcttttattatttatttggttgaacctgaaaaatataaaattatcgctgaagcaataataaataggctaaacgaaatgataaaatctattcctaaagatactaggcaagctctagaggatggaactactgcttttcttaggccaaggcctggtgcatctagaatgtatcccgaaacggatcatccattaatttttatagaaaaaacaaaggatggctatttagtaaagtatggagacaaagagtttatttataaacccaaaaaaatcgattatgataaaatatttcaatacctaaaagaaaaaactaatgagaatttggctaatgccataattaagagcgaacatgtttattacattatggagctttttgaaaaatacaaaaacataaaaccaacaataattgcttccatattttttaaccctgatgtaaaaatagactataaaaagatagacattgccctaaatgctttgagtaagggtttaataacaaaagaagcgttagtagatgtaataaatagtgataaccctgaaaaaactattaatgaattaaaagctctatcaaaagaagaagcgaaaacaattattatggatttaattaaaaaacatggaaaaaaagctaaagccatagctttcaaagagttaagaaaaagagtagatccgaaaattattaatgaaattttccaagaattagaaggataatgggtttttagtattatcacattcagggtttttacccctctcgcatacacccatatctttataatattcggttctatcgcaatttgggggtaaatattgtacaccttcagattcttttctcatatgccactctatttggtattctatatatctttctcttaatggggggtcgtttctttgattccattccattaaaattctttttatttcgtcccagctatagccttttcttctaaaatagtttattagaataaatacagctctctttctcccatcttttaacccttttaatatgttttgtatgcatggggctattctattagttttcggttttcttttgatctcttttattttttcccatttttcttctttttggtatttgtcaaaaaccaaagcgtcttttataaattgctctaagcttttgctttcttttacattaaaatcccaatctactggttctactaattcgggagaagctaagagaggttcgaaatttgatatgtcttttacaggaatcgatgctaagcccgttttttcatttaaagaataaggcgccctatataaatgtcttttacttattacaaccatatcaactataaaattctctattaattcattagcatctttgccagtttcctctaacaaaggttccaaatcatttttaattttttctttaactcttgtaatggtataatacaataataatctggccaaatccggaaacctatcttttagttctattaactctccatcaaatactatctctttagggaaagcttcccatggcactattatgtggaaccccttattaccagaatattttataaaatggggaattcccttgtttgttagatatatatctatttgtttagcaattaccttcgatatatcaatatcttgtgtatctatatcgaaaaccaaatcccaaccaattcttaattctttttcgttcgcttttcctaataaagatgggtctttccatctttctaaagatatatggaatgacattgcccctttttttacttctaacaataaatcttgctcgtattctattattacaggcctcctaaagaaggatttgtttttttgatataaaatcccaacctctctattttcgaaaaattttattatataaggggcaacttttttgtaatattctattctatccaactttctttagatgggctggatgtactataagtaatttcttttccccattgaattctaattctacttcatagcaattgcctctttttccaacaactgtaccaactaatccatggtatctaggatggggcatcccataatgccaagaaggctctataactatagctactttgtcattattgttaaacttttgcaatatcctagttatagtaagtttgcccctttgcctaggatgtttagaaagtttatctcttgtttttcttctaaagcctttgccctttctatcaaccattggatagctattaatagactctttataaatgcaaatgcagattgaagagcaattaaagattatagaagatttggttaaaaaattaaatgataggttagcagttccatatatatgggagaaaactaaagaccctttttgggctttgatcgcgacagttctttctataagaaccagggaagaacaaacaattagagcttctttaaatttatataacaaatataaagattataaaaatttggctaaagcaccaatagaggaaatagaagatttaataaaaaatgttggattgtataagcagaaagcaaaatggattaaaaccatagctcaaagatgggattataataaaaaatgtgacgaaagctttataaggaatttacctggggtaggaagaaaagttggcaatgtttatcttaatttagtatgcaacaaaccctatatagcggttgatgtgcatgtccataggatagccaatagattaggttgggtaaaaaccaaaacccccgaggaaacggaaaaacagttatacaaaataatacccaaagagtattggcccaaactaaatcatatgcttgttttgtttgggcgaaatatatgtttaccttcaaagcctaaatgtgatatttgtccattagattgtccctataaatacaataaaaataaaccttgaatggacatagataaaatactagaagcagggcgaatagctaaagaagccagggaatatgcacaaaaattatgtaaatctataacagatggattagaactagcaataaaagtggaagagtttattaaaaagagggccaaattagctttcccagttaatgtttccatccataatgtggcagcacattttagccctatagagcctatagagatgtatggagtagtaaaaattgatttgggcgcaaatgttgatggctatttatcagacacagcctttagttgtgatttagatggtaattacgaagaactagtagaagcatcaaaaaaagctttagagaacgcgtcaaaaataatgagatatggagtaactttatcagaaataggcaaaactattgaagaaacaataaaatcttatggtttcaatccaataaagaatttgacaggccattctatagaatataaccaattgcatgggggattatatattcctaattatgacaatggcgataaaacaattataaaagagggattatatgctatagaaccttttgctactatgggaaagggctatgttagaaatggccccccatctaatatatatattttagtaaaacctaagagagttagagacataagagctagaaaggttttgcaatacataatagaaaactatggatggttgccattcgccaaaagatggctaatagaggaattcggcccaatagatagagagctttactatttgcttaaagaaggaataatatatagttatccccaactaatagaggaaaaaccggtatcacaattcgaacatactttcttagtcctaaaagataaaaccattatcacaaccctttaaattgttattttattatactcaatgccaatatatgtttgctttaattgtgggagggaaataaaaatagaaggcaaaccaagatcgagatgcccatattgtaattctacactattgttcaaaaaacccccaaggttaactaaacatctaaaagctaggtaagccgccggcgggattcgaacccgcgacctccgccttaccagggcggcgctcttccgctgagctacggcggcgtaggagtatagatgcaacatttaaaaatctttaaaatgcaataattcgatagctcgtgagtattttcaaagaactaagcgatagtcttaaacaatatttaaaagaaggcaaagacccttttcccgatataattgggaataaaaaggctaaagaagatgttattagttgtttgcttagtgggaggcatttcttaattataggtccccctggcatcggtaaaactacattagctaaaagcatagctaaaattttgcccccaattgaaacagacatagaaccatattggttagaaggcaccccattcccaacaaagaaaacaaaaaagaaaaaaatagaagggataaaaaggtttgtacgtatacagggtagtcccgatttgaatcccgaggatatagttggcactatagacccaacaaaagcactaaaatatggcatatccatagaaagctttgtgccaggaaagatatttagagcgaatagaggagttttattttttgatgaaataaacagggctcctccgaaaatacaaaacctattattacaagcattagaggaaggttatgttagtttaggcccattcgatatagatgtgcctaccgattttatatttattgctacaatgaatccaaaagaatatgaaggaacaaccgaattaagcgaagcactaatggatagattagatataatctatttggattaccctgaaacattagaaatagaaaagcaaatagttttagaaaaaggcaaaaaattagttttatttccagacgaattgttagaaaaaatgttgtcttttattagagaattaaggaatgacgaaaatttagaaataaagcctagtcctagggctagcattggtatatatgaaagggcacaggcatatgcattaattagaaattctaaaaaagtggaatggcaagacatagaaagagcattcctaagtgtgttgccatctaggataaagcttaaaccacatgtagcaataaaaatggatgaacaacaatatataaaacaacttttggacaaggatactaaaaaaaaactataataatctctaaagctttagcaaagggtatacaaagaataaataaaaacacaataaagcacaaccctgacataataggaatcccaatagaggaattaagcgataaaacaataaaacaattacaaaaagagaaaattatagatgaagaagggaaaattactcaaaaaggtttggccatagctttagaggaattaataagatatgggcattatctttttggcgaaaaacctggttttggttatgaaaaagagataattggttatacccaagggttaaaacccatatgggatttagatttgaggaaaaccacttatatgttagctataacaaagaatttgctttattctctagtttttagagtgtataggcctttagcggaaaaggagtatatagttttattagattgtagtgggtctatgaaaggggaaaaatttgaaaaagctttagcgatagctttatctattatatataaatacaaaagggttggccttattttgtttaacaataaaataataaaatctattcccccaacagagaacaaaactttattggttaattctttgtttgttatcccaagagagaaaaccaatattagtattgcattagaagaagcaatgaaatatgctaaaccaaaaagtgagatttttataataacagatgctgttcccacagatgaaacagttgatgaactaatagaaacagttagaaaactggctttaaaaaatataaaagtccatgttattggtataaacctaaaagaaggcaaaatagttgcagaaacaatagcaaaaattagttcttctttattgtacgaattttaaaggaatggtccaaccaataaaggcaatattatagttacatctccccaaatagttacatgttttgcttttttgtctattttaccccaactaattgcctctctcgttctagccccagagagagagccatctaactctactgcagaagtaacatacacagcatattttagaccattggaaaattgagcccaccatattgtgtggtgtttagagataccccctccaagcattaatgcgcctatatttttatccccaaagaattggtttagcaaaaattcttcatctaaccatacatttacattaaaatctctatgttcttgtctgaacaataaaatttgggtaccaactgctccatcggttatgccaggtattattataggaattctatttttgtaagcccaataaataatagattcttcttttttgggatggttttctaaatattcccctaaaagccatacaaattcatatgtggataactctttctttttattataaatataaggtaaagctttttttagtatattctctattgccagaccatagttttcctcaggaataaaaatgtttcccaatctaaatatgtttttctctctcaactctatatcgtccgcttcaaagtatcctaaataataatctttttccaacctcgctaagtcatggtctaatgtaccacaagtagttataactaaatcgaacatttttctttttattaactcttttattatccctctaatccctgttgcaataatgtcggcaggaaaacttaatattttgtattcggcattatcaaacatctcttttaatatttcgtaacctctatacagttcttgtgcttggaatcctccaatggaagaaaactgttttatcaattcttctattgttgtgtttttatttacatttaaatctctaacaggtttcattatttttgtttgtcagacaatttataaataacattgaaaacctttagctcttcttttaggttatctagtatcttttttgtatcttcattattaaatgtatagctatgcggttttaatgttatataaggataaaacattgttaccaattggggataacctataatatctttagctcttttgtacacatattcataggctaactttcttaaagcgtagttaagataatctaaaaaggttgaattaacttcgataggaaaggaatatttatcataaactaagggcactattattgtatctatgtggaataatatgatatgtttattcccaaataggggatcgccattaactaggatttttctatctatgtcattgccatccatattattactgggagtaaatactatagctagaacattattatttttgtctactagaaacaaataaccatagacatcttttacaagatatgaatccttattagttttaaaaaataaaccaatccaatcgccagtatagtaagtataggtagtactagagaaccagcctttgtcttcgtattctttaaagaaagttttttctgggaactttcttagttctagtttatcccctccccatacaggaaaatagttattaactatagcgtggggccagctttctattactccataaactttgttcctacttatgactaaagctgttcttcgggggaaataaactatatcataattatttataatatgaacattaggtttttcgtctacccatatttttttcaacccatacttcagcctatatcctttaggagtatctatttcttttaatgctgggataaaagatatttttattgtatctaacacatattcgggactatccgttaacccccgagaatatacgctaaaaacaaaatcgtaatctatgggctttatattatctatttcagagataatgtgtaaaggtataattcttttttcatctctgtctaatttgttattctcattccaatccataggacacacaaatttgttttctctccatttgcacgcataagctatagctattacagtattgttaagccatatagatttgccatcatctaatatgaaaaaattcaatgttattaatttgtaagggttttttaataagtttaccgcttctctttttagttctttctcgaaagccttgtagaattcttctttatcaaatttagatggcaataactctaaaggtttgcccttattgtaaatagctatataaggtaaaacttccaatgttttattatttatataatagtaagcctttaattgtaccttgtaccataaatcaatttcttctattctatcatcaaaagagcaatttgcttctatatgattttcttttaaaactccatcgcaaaggtaatatttgtccctatatatctttaatccatactgtggttttttaataaacataaaggtttttccatctctctttatctcttttattttttcataatcaattgttattataacagtattgtcttttatatctaatttcgcaccgcaagggtattctattactaaacatattttcccctcacaactgctaaaatatatattaatatagtttatttttttgcaaacagttttaatttctttgtctgcagttatttttatgataaccttattagcaagcttttctacatctatactagggggagcaagttcaatattttttgcttctccactatttaattctatataagcgctacccttccctttaatatttagttgggcccaccctatatagtaattgtcatatcttgcttcaatttttatgttatctttgtttgtttcgcatatataataattaacctctttatcacatttttcgccatttacaaaaatctccatattattatactctttttttgttggctctatttttagtttaatattttcttctttgttaatcaatattttaaaatctgtttcgaattctccgcaaatatcatatgcttctattcttttaccgggcttaccttctggagtacatatggtaaaaccttcaatttgcttatatatgctacataaccttttcccaattttcgataatatgttggaattaatctttcttatgtgtaatccatcttttgcgaaacatttgacttctaggccttttccataatagtaagtttccctttctaaataagttagatctcctttttctgtttctataaaataattgcctatatatttgccaacagctttttccttaaataatgggtttattttgacaaaacatttagttggtattccttctacggattctcccttataaaggggattttccaaaattagttttcctttttgcaacgcatctgcttcgcatacatctgctttaatataaccattaggggtttttttaactaattgggcatctattttggcctttccaatataaatataaccatttccattttcatcatactctccatcaattatataggtttttctaactaaaacagtattaaaattgaatacaaattcataattacctggttttaatgctgtttccggtatgctatttaaatcgcatacgatttcttttttattatcgctatctatatctttaaaatcacaattccagattattctactaacttccactgtaactttttttatattgtctaataatttgtctatttcgcctaatgcatcaacttcaaaatataatatattactatagcgaggagttattaaaataggagaacaatatgttacatataaatcatgtaaacttcccgtttgttcactaaccaacactttagaattgagtatttccgatactagtgtagttctatcccctatttttatagaaatgtggttttctttagctattgttgaacaatcctcagttgggttattttttaatataaaataaccatcttttatacaaactgtggataaaaactttctaatactatttaagtcttcacaagttttttcgctattataccaactaactaaaaaatctattacatttgaaggtttttccccaaattttacagctttgtttataacgaaagcactagtagctaggaatatacctaataataccgcttcgaataggacttctaaagatctattcaatcctcgtaatggcatattccccattgcctatatatttttctattatgtcgtttatagtttttaattttctttccaattcctttgggtcttcgccttctattctaatataatatttaccagacccttggtatttggcttcgaatcctaaattctctatttcttcaaaaatttttctaatcctattaatgccatcggtttctattgtatataattcgattaaagcttttatttcatatttttttggttttattctttcttttattatttccaataacggttcggcatattttttaggaattctatatttttttaacaattccgggtttttagctatttctaaaaaagctttgtataaagaaacctctttttttaatatgggctctgcgactttctttcttattgcttcgtaatcttcatttaatttattggctaataactctaaaattttgttagctgcttgttccattctaaattcggatagctttctctttacttcttgggggtgggcctttcttaagctaaaataaatagtttttgataaaggatcaactctaattactttgcctacaactatttgaccaaccctaacatgatcttttatgtcttttattctccccctagcaacttcgttaaatggcaaaatagcatctgcttcatattctaatggctctgctatagctgcggctgggtctattttgattatttttgcaactatatattctccaacattaggtaatgttttcttctttatcacttttcatattcaaatatgcctttataagtatttattctaacatacttgggaacaaaatccaatgctacacatggaatattgttttctcttaaatttatcgctaaatgcgatagaaatgttggctcttttactattataccttttattttgtctaaatatttggagagccaatagtatagcctattcacatatataataccctctattttatctttttcgctttttatgtattttacagggccttccattatgccagggctaataactataatgttagggttttctgggatagttttagttatgggcctaacttgtaaaacgtataatctcttattatatgcgaactctatatcaatgtcaaaacccatatattttctaatttcattaattttgttctttattctatctaataagctgtcaacctttttattaaataaatctaaatttttatagattcttttcccatcaatgtatataacatcgctttcttctgtggcaaacctcttgcttaattctattattgttttattatatacaaatcctactccatggtattgggcttttatatatttggtaactaaaacaggtattcccttttcttgtattttcttaatataaaacaacgctttcctttttggcactcttatataggattcatatttaccagcattggctttttcttttgtatcttcatcaaaagaagaagacctaattgagtaaaatctataattatattggtttagggctttttctatggtataatcattatcctctaaagttaccacaaacccatttggagttaaaaatttttgtttaactaacgataaataataagctttgtttcctactaattctttatatttgtatgcctcttttagaggtatcacagaattttaaagcgatataattaaaaaagcaatgataaaagcccaggttttttatgacgctttgggtgctccaaaagaaaatgttgtttcttttttaaaagatttggttgaaagaataaagcaatacgaaggagcaaaagttattgattataaaatattagagccagaaccccaaggaaataacttgtattcttctgtagcaatattaataatggaattcgaagatttgtttagagtatttcaattcgttttagattaccctccagcgacaatagaaatactatatccggaaggcccagatcaattattaagagatatagagaaagaattatccaaatgcgttgataaagaaaaagtaaaccaacttagaaaagaaattaaagctttgaaatctttgataccaacgaaagctactttaaatttgattttaaacgatttagcaaccaaacaacatcaaatggggttgctaattaaagaattacaagcgaggttgcaacttcaacaatagattttttctaaatttttcgaaaaataatacacaaaccaactaattataaacaaaactgataaatatataaacttaaaaggtataaaaaggataggaataaacaataaaaccaaaacaaatgagaataacattgatggcaaagaaaatgtatatgctataagtttttttgtattagtttcgttatgcaatgctttatatgttggatatattgtcaataatagcaaaagcaattggaatataagtaatgtaattgttgataacaacaaaaccatattcatcgggtttttcattatttggttaaacaaatagagcgatagcaataataaagatatgtttaatattttgaaagctgaatggtattttattaaaacaggcaatacctttttagttctctctatcgattcttttatagaataaccaacaattatggaacgcgctaattctatagcccatatcaataatacggtttcaattattataattatcgacaatacaactatatcatttatagttaggtttaaaccgatatttatagattgggcaagcaattccataatatagctaactatcaataaagcgataaatttcaacatgaaaatttttaaaccaattatttataaggttctgggcagccacggggcccgaatttggtccccgtgaccccggttcgaatccgggcggggctactcctttatttttcttaataacttcttatgcaatctcttaatcatctcttttttatcttgcataaatattatatcactttggccccatacttctaaatgccatgcaaatggagaaggcatttccacttcttttatatatattttcatttttttaacttttctcataaattctttagcatggaatatatccattttatcctctagaattgttctatatgtttctttcaataaaggaaaatctgggtaatgctctaaaaggaaattcaataacgattctgcattaatttgttgcctcgatattggtatttcttttcccatgtatttttttagtatcattaaccctgtatttgccacatgtctaaacaccctcttaaacatctcgctatttttaatggcttctcttaatatttcttcgaatttatcttcttttattgataataaacctaacaactctactttttttaatgctttctcttttggcactattatagaaaaaccataatccgatacaactgttcttacattagttcgcttttctttactaattaaataagcgaaagctctagacaaagcatcgtttgcttttcttcctaaaacagtatgaaaaatgtattcttctatgtcattatggggatatacctctattaatagttcgtctctctttgggataagcaaatatttatattgctctaacatatattgggccaaattttttgctactctatcatttactttgtatttttgttttatatagttagttaaattctctatttcaaccattctttcttaggacggaatggtttatattttataccattgccctggaaaaacaaactaaatgcctctacataatgcaatcttaaagaatgtataaacccacttagaatagataagataaaattaaacaatattataaagggtatagcaacaatttttattgggttagggaatatagatgttagggctatttgcaatatatttgtggctaatgccaatgctgttaatctaatatagctaagcaatttcgatagtaattctaaaaatggagaataaaattgcaatctgtttttccatatactataaattatcaatggggcgaacgcgtatacaattatattatttatgggcatttttaatagtaagcatatagttatataccctatcaaaggaattgctataagttcaaaaactttttttcctaaaatagaagcgatagttaaatgtattactcctatagctataggtaatcccaaaagaattaggggatcttgtatgtttagcccattggatataggataagtaaataagcttccaaaaacaaaaccaacaaaaatagatattaaagagctaaccaataggatagtaaatagctttttgttatttgtgttgtcgaaatacctttttaataataaggtaaatactaatgataataacccatatcccatgtctgcaaatgttattgcatagaatatagggaaaaacaaagctatatacaaggtagggtctttttctttataatttggtatagagaatagctctattaaatattcgaaatctctaactattggggggttatttaataaagtggggccttctttggcttcttttatctctaaaattacgggtttatcttttaatagatcaactaattcgtttaaagatctctttggtatataacctctaaccattaatattactccttttttgaaagagtattctattgcgttcaaatactctaatttgttttccaaatattccttataagccaaaatcttttgccagtcaatttttattttttctatcttgtattttttgttttccaatttagccaaaatttgcttttcatattggtcagctagtttttctaatttgggtaaaatagaataaaaataagctctcgcttcctctttagtatagcgctttttcttagtaaaaaccaaatcccaaatagatatcaaattaagcttatttattaaatctaaggcccaataaaccttggccagttctttttctatttcttccctatattctatattaagggattttttcttcgataatattagatgggctttcccccaattatataatatttttgttatagcaaacgcttttgttatcgggaaatagagtttaaacttatatagaggctctatcatttgatcgcttcagctttcgcttgttctataattcttttatataattgttctccttctctatatgcttgttctataatcgctttataatccatgtgggcctgcttaatcatagaataaaacaatctatttattctttctattttctctattattgttggcactgttagttttatgtggctcatttaaaaggctttcctttagtgcttcagctatagattcttttattatctctttagcaaaattctttatatggggtctaagaaaaaccataactgtaacagaggcgagcaatactcctaacacatagcccaaagcgctatctatcatagacattgggctttatcccataataactttaaatattgttgttttgtagtttaatggaaattatcaaagaagaaccaatcactaatgaaaaagcctatcaaatattggctaaacaaaaacaattatcttatagagcagaaagaacgaaaaagtatttggaaaaaatcggttttataaagaatagtgacgaaatattaaagcaattggttgatttaggcatagagttggaaaaagcgataatgattgtaaatactatgccaaaaacaaacgatgaagtaagggctatattagaaaaagattacacccccgaaataggcaaaaaagtattagaaataatgaagaaggctttaagctctgaaaaatgatgacccctggcagggacagattatagcttttgaaccaatttatataataacctaaccccaaaccccgttaatcctttgtatgcgcttggtattgccctattagctatcgctggcccagcgatatctaaatgtaggaatttttctatagggctaaactctttcaaaaatagccctccctggattgcatgcgcttctctcccattagcattcttaatatctgctacagcactttttaataattctctataaccttcatataaaggtaattcccataccaattcgtagacttcctttcccgcttcaattgctttatttactaaatctttttcccccatcgctgcggcgatttcgtggcccaaagcgattatttgtcctcctgttaatgttgaaacctctattatggcttttggattatattttgcactataagcaattgcatctgccaatgttaatcttccttctgcgtcggtattagttacttcaacagttttcccattataagcctttattatgtcattaactttataggattctcctgaaataacattttctgctataggtattaacgcaactattggaatatcttttttgtttttagctattgcatatagcgccccaattactgcggcagaaccggacatgtctccatgcatattatacatataatctgtgggcttcaacgaataacctcctgtatcaaaggttattgctttcccaactaaaacaatagggttgtcctttaaattgtattctaaaataactaaccttggtttgtatatactgcctttgcctacataaaccaataagtttaacccttctcttattaaatcgtcgtaatgtaatacttttatatttacaggcaatcccttaaatatctcgattattttcttttcatatgtttcaggatttaatacatttgggggttcgttagctaaatccctagctaaatattgtgcttccattaatgtgatatattcttttaccttctctttgtcatcgcaaataaattttattattttctcttgcttttcgcttttgtatctatcaaatatataagatgtagaaagaatcccaataatggctttatctttgctctctatttctcttaaatctattataaattctttgaacggactattttttatatatcttcctgctaagaaataggctttccattcgtcttttacataaactattagataatctctatctttttttacaaaaatagcattatctcttttaaagaaatcttcatcaacattagcatagctttttactgattccctatctttaaagaactttactatcactcccccatccgcgtggtctgttaaataaaatttggttggcattaattaatttgatgttattttataaaagggttttttattattatgtatgatgaagaaaaaattcgaagaagcattaaccaaattcgaagagtttgggttggtaacattagcattagcattcgtttttttggttttagtattgtatccattgtttatgggagtagcttttgcttttgtagggttagtttttaacaatataccttatgcacataatgcaatagtttatacattaaagcaatttggcttagattttactaataagttagattatctaggattcttcgctggggtactattggcatacctttcaatattagtaggagaattccgaagatgatcgagatattaatagcaatattagatatagttttatctatttggaacgcttacgcttcagggtataatagtgtattgctaagaaaattagagttttctaacgattggaagataaccctattcagtatagcgaaccagtttgctttagtcttagcatttgctggcgcaacatatggtacagcaataatattaggatatatattaatgtatttgcattatattagctataaagcgctaatcgctttattgtcgctaaacaatttagtttttggaggtttaatagtattcactggtatagttattactatacaatccatagtgcaagcatcagtaactaaaaaagctatagatattggagtggcgatatataacactatagcgtctttgtttaacctaatacaatacatacaagctttccccgctttaacagaaacctggaacgaaagcgaagaagaaaacaaaaaccaagcgttaatagtattagccttagctgcttttattggaatagtattaacattttatgcctataagatgggaagagaaaaagcattaaaagaaataaattattcaatcgcataatttattgcttctcttagatttttaacaggtattatagtgaaattaaattgtttaaaatattggaccaaatctatttgctttggctctaataccattgtacaagtttttatccctaatattgtgtggcacttctctttatacaaataaacagtataatatctgttttgccacggtattataaagcaattgtatttttgcataactgctttggctttttctattatacccccaacagggtaaacattaccataactatctactactcctgtggcaacacaattttttagttttttgtccaatagcaatgcacttacccctaaagctactgccaaacctgctgagggccccccaattaaagaagtattagctttaaccgatattgtaaaatcatattttttgttggattttgttacaaagtaagcggctttaacagcattataaaagctttgttgtgttgttggttcggaaaagggctttatatctaaatatatatgcccttttcctggtttagcagtaatttggattttagttaatactccccctccatcagcaatagctaccgctggtacttcaattagtttgctttcgtttatttctatagatttatcaaaggattttgcgaaaaaataccctagaaagaaaaatataatgggtaataaattctttaatgtgttaagcttcatttttcaaacttcgctttgaattcaaagctatccatgttctttaatagctgggcatattgctctaatattttatttaattgcccactcctcattagttttaataactgtttttgtaatttctttttacattttttatgcatatatagggttgtgcctaaaacttctaaagtttcgtaatcattttcccctacggggtttccacatataaaacatatcttattgtcgctaagttcttttagtttttccattgctttgtttaaagtttcatcatctaaccccatggcttttagattgtctatttctttttcctctttctttttcttaaagggccacatataaattaggtaaacaataatttaaaatgatgaaggtgatccagcctgaattatgatgacgagagggttagctgattgggcaagtcttctatttttactctaacttgtttcatcgtatctctatctctaattgttacggtattgtcctctaaagtttggtaatctattgttattgcataaggtaccccaatttcgtctacccttctgtaccttctccctatagagccttgttcatcataaattattgggtagaaatagttttttagcatattatatacttctttggccttctctattagttctggttttttcaataatgggaatactgccacttttattggggctagatgttttggtatctttagtacaactcttttttccttaactttttgattatccctctctatttcgtactcttcttcagttaagaacaaatctattagagctaatacattcctatcaacaccaaaagataattctaaaacatgggggataaactttttattgtctttttgcacagttaggtctttgccagaaactttcatatggcccgacaaatcatggtctgttctataatggataccaccaacttctttccatccataggttgggaaatttatttctatatcaacatggtatttattataaaatgctttttctttttcgcttaactctctaaacctaagcctttcttcggggattcccaatctttcatagaattgctttactttccctacaaaataagcataaaactctgggaatggcaaatcttttactttaattcttttgtaattcccttctttgtctaaaaagtttaattctacatcttttacttcatttatatcgaattcattatcttcaggatcaaaaaatatttgtaactctgcttgtgtgaactctctcaatcttaataataattgcctaggactaatttcattcctaaaagcttttcctactactgctaaacccaaaggaagcttttgtctatgtaaaatgaattctcttttaaacataacatatgggccttgggccgtttctggccttaaataagcttcattttcaaccatttttttaactctttcgataatatcttttatatattgttcgctcacattttcttttaggttttttaataggttcaatgcctcttgggaatcgggcccaatataaatgggaaacatcaaattgaaccattttacttttcctaatggtgcattacatatagggcatctaacattttttaatagctcttccatttctgataaagacagaccttccgcttttatgtttagcttttcctctattagatggtctgctctaaatctatggccatttttacattcaacaatcgggtcattaaaattctctaaatgcccactcgcgataaacacttctttaggcatcactattgcgggatctacttcccaaaagttaggatgcaatctaagaaaatagtttttccattcattaataaaattgttttttaatagtgtgcccaaataaccataatcataaaaaccggctatactattataaatttcggaagccgggtaaaaaaacccttttaatacatattcctttagatccataaaaaatttgttctatactattttataaatttatctacagaaacaatttgttgcccctttagtttagatctaatattttttaatatatccaacgcgcttagttttatgttattaatgttattctccatttcttgtactatgtttactgaatgtggctctatttcttttaaaaagtcttcgaatttcatttctctgccttcatatattacaatactatcctttaaatctatagtttcaattccttttttgctacccctaaatagctcttctactctcccatcattatataggcaaaaagattgaaatgctgtagcaccgctacttagatcaaattcttttctattatcgagatgtccctttattatttttttgggcgatgttccgtaagcagaaattttagcactaaccaaagaacattcttctccgggatgtaccctaataaagaaactaacaaatttatcatctttcttagcaaatagtggttccatataagcttgcaccaaagctattggaggcaaatcgttttcttgtgcatataacacaaaactttctaatgccttagcaaacctatttttgtttttagccactccaacagaataacccccagattcttgaccaaaggccggttttattactaaatatttgctatttaacatattagatatttcgtcgaactttttgttggcaaaatccttaatatcatatatatcttctaaattgactaaaactgctttaggcaaaaactttggagctattaaatattggcccaatttactagacaaaccataagattttgatgcatctccttcttttccatgcatatacattagagattccataatttttttgccaggtcttagattagaattatagaaatcgcttaacgatggctctttatttaaagtatgtataaatggttgttctccttcctccacagcttctttattgtatattttcgcgggtattagctctttcattgtcatatattggccaactttctttggtttgttataaacaaaaatagcagacccaatttgttttttgttagataaataattgtaaatattctctgctaaatcagtatttccttcatatacaacaaatacagacccaattggctcatttaacttttcaataggtaatagcttctctattaaatctggtttgttccctagattcaaaattatatcccctgatgttagatttgtttcatatattttgtctttacctacttgttctgctgttttgaataggtttatcttaccggttctgtataccttcattgcaataaaagtagtaacaccattatttaaatgctttaattgtccgtgttatattttaaaaagcctttgccgttttagcatttaataggttttccatccattaattggtgtattatgatatactagctaaggaattagaaaaactatatgaaattgctgaaaaagctagagcacaaggatatgatccaaaggacattgtagaaataccattagctaataacatgggggaaagggtagcccatttaattagtgctatccatgaacaattagatgtaaaaaagacagccgaactaatattagaattagaaaaacagtatggctttttggattggcgtgttggtttaaaattaatagattacgcattagaaggaaagctaattccttatgatgatatactaaaaagaattgacttaggagtaagattagccttaggttatataactatgggagttgtctcagctcctttggaggggttagtagagcttaggataaaaaagagaaaagatggaaaaccttatttggctttatactatgctggccccataaggggggctggtggtactgcggcagcagttagtgttttatttgctgattatgctagaaaaaaagccggtttatatgaatatgacccaacaaaagaggaaatagagcgctataaaatagaaatcgattcttaccataacaaagttgcgagattgcaatacaaaccatcagacgaagaaatagagttcttagtaaaacatatacctgtggaaattaatggagaccctacttctgataaagaagtaccttcctacaaaaatctagaaagggtagaaactaatagaattaggggagggatgtgtttagttattgctgagggtatagcgcaaaaagccaaaaagatctatggtaaaataaccgagtggggtaaagaattcggtttagaacattgggaatttttgggagaatatttaaaattgcaaaaagagatacaagccaaattagctgcagagtctggaggtgaaatagaaggtaaagaaataaaaagaaaaataactttgtttttagatgaaataaaaaaagaagaaataacagttaaatatcccactcctgcaggtaaatacttacaagaaataaccgcagggagaccaatattttctttgcctatggccattggagggtttagattaaggtatggtagatctttcgctacaggttttgctacctctggcatacaccctgcgactatgtttttaacctatggatttttagctataggcacacaaatgcgtggggaaaggcctaaaaaatcaacaatagttactcctgtaacttctttgcatcccccaatagttaaactaaaagatggcacagtaaaaaaagttcattctgttgtcgaagcaataaaaatagcaaatgatgttgaagaaatactatttttaggcgatattttaacagcttttggagattggttaaatgaaaaagctaatctagtgccttccccttatgttgaagaatggtggatacaagagtttgatagggcagcaatgaaaaaaaccgattataaaatagaattcgatgtaatgaagccaagaaaactattcaaaatagaagggttggaaaatttgtctcaatatttaggaattcccaaagatagattagaagaaataattaggaaaccattctctaggaaaccaactattgatgaagcaataactattagtgaaaagcttggaattccattacatccagagtatactccattctgggttcatataacaaaagaagagctaataaaattaatagaagagcttaggaaagctaaaattcaaaataacaaaatatatttccatgaatcgcaaaaagagctaaaagcaatattagagaaactgtttattgaacattttagggaaggagagtacttttatataaacgaaagtatgacaaaatctttgttataccaattagataatctaaatttagaaaaggcaaaaaaagaattcgataatgctatagacgctttagatttggttaataggttatccccaatagagataagggatgttgccggagtatatgtagggtttagagcgggaagaccagaaaaagctaaaatgagagaaatgactggtaggccccatgggctattccctgttggagaagaaggtggaaaaatgcgtaatgttatagaagcctataacaaaggctatgttaaagcagaatttgctttgtattattgtaatcattgtaagcgctatactatttatagaaaatgtgaagtttgtggcaataaaactaaagaggtttatgtttgcaaagaaataataaatagactaaaaacctctctattcaaacaatataaggattggaaaaaagttgaagaagaaatagcttcccatctatgggcagaggccgtaacacattctaaaaataattgtagagagcctaaaagatatagtctaataaaactaaacataaagcattatgtagatagagctgttcaaaagttaaaactatttaatataccaaaattagttaaaggagttagaggtacatcaaataaagaccatatagttgaaaggctagaaaaagcctttttaaggtctgtaagtgatgtttatgtaaacaaagatggcactataagatatgatggtactcaaatacccttaacacattttaggccaaaagatttaattggtgttacaatagaaaaactaaaagaattgggttatacacatgacatatatggaaacccattggaaagggaagatcaaatattacaactaaaaccccaagatataatattaccctatggtatattagttaaatcccgtttaaataaaaacaaaatagtaagaacagatgcggcagaagcatttaagaaagtagcaaactttgttgacgaagaattaaagaggttatacaacttagaaccttattataacatagaaaaagccgaagacctaataggaaaaatagtttttggtattgctccccatacatctgcagctgtagtaggtagaataatagggtttaccccaatacaagggataattgcccacccgatatggcatgcgggccaaagaagaaattgcgatggagacgaaaccgcagtaatgcttgggttagatgcgttaatcaatttctctagagaatatttgcccgacaaaagaggggcaagaacaatggatgcacctttggtattaacattaaaattagagctaaaagctgtagacgatgaagtacatgatatggatattgtttataattatcctttggaattctattacgaaacattaaagggctctcccgcaaaggatgttaaaaaacaatgtggtatactaacattgggtgattttctaaaagaagaagacataagtaaaataccaataggctttacccatccaacaaaaagtattaggcttggtaataaggttagcctatacaaaaggctaaaaactatgcaacaaaaaactgaatggcaattaaaattggcagaaagaattagggcagtagatgaaaatattgttgcagaaatagttatagaaaaacatttcatgccagatataaagggtaatctaagagggtttagtagccaagtctttagatgcactaaatgtgacaccacatacgatagagtcccattaagtgggaaatgtccaaaatgtggaggcaatatagtatttactgtacacgaagggactataaagaaatatttgcctacttctctctatttagctaggaaatacaaaataaagaaattcacaaaacaaagtttattcttattagatagaagaatcaaacaaatattcgggggagaaaagaaaagcttggcagattttataaatagctaaccttcttaaaatttttaactaaatattcagccaaatttttatccaatattgcaatatctcctttttcgaaaggcccatagaagttaccatcctcccaatagaatttctctatattagtatctatatagattatttcgggcatctctatttgttctgctttttctccatttagtatcatggttattgttttccaatatttgcttaatacttcgtataattcgttatacaaaagtttttcttcaggtaatccattaatctctacttttgtttctgttattactgaagataaagcagtttctattatttttttgattcttttcacgaaaagtttttgcgctaaagatcttatttctccatattttttggataaagcctgttgggtttcaaaatcaactttagacatgtcctcttttatagttttaatcgttgagactaaatcgtataaaaaattttgatctaattcgattagctttttgcttttactttcctgttctaaatattcttttagttctctaatggagaccatccatttttaaatgccttagagtttaaataaaatgaaagtaggaaaagatataattttattagttctagcgggggtatctttaattatagtaggaagctatatgctaatgcaaaaccaaccaaatgaaaagaccaataatgtaactaatgttaataatactaataacaataatactaccaataccaataatgttgatgaagttaatgctactctaaaagctctagaagaattattaaatgaaagtccttaaattagaaggaattagaaaatcctataatgatttggtagttttggataatataaatttagatatagatgaaggagagttcgtttctataatggggccgagtggttctggaaaaaccacgctattaaatataatgggtttgttagataaaccggataaaggcaaaataataataaaaaacaaagatgttactaatatttatgatgataatattttgtcctacattagagggaaagaaataggttttgtttttcaacatagctatttaatacctgtattaacagctttggaaaatgttttgttaccatcaatatttattgggagtccaaataaagatagagctaaaaagttattggatttggtaggcctaaaaggttattataatcattatcccaaccaacttagcggaggacaacaacaaagagtggcaatagcgagagctttaatgaataacccatcaattattttagctgacgagcccacagcgagcttagatgtaaaaacagcaaaaactattgtcaacctattcaaagaactaaacgataaaggccatactatagttatggtaacccatgatccaaatatagcgaaatactcgaaaagaattgttgtattgtatggaggaaaaatattatcggacaatgcctctttagaggaagcgttgaaattgattgaacaatgatatacttaattggtttgggcataagaaagggcgatatatcatatagagcaatagaattgttaaaaaatttggataaaatatatttagatagctataccgtttacataaatagctattacaaagattacataaaatggttagagaacattattgacaaaaaaataatttttgccgatagggctttggttgaagagcaattagaagaaattgctaaaaaagaagatgttgctttattaacgattggggatcccttgttcgccactactcatatatatcaattcaaagatttaataaaagatataatacatgcgccttcagttttgaattatatatataatttgggcctaagcccatataggtttggtagaataatatctattccccacccatctaaagggttatacgacatagaaagtaaaatagaggtaaatttaaaaaatgatttacatactttaattttgttagatacagatcccgttttagattacaaaactgcaataaaagtatataatttagacaaatattgcactatagcagtatctattggggaaaaaatagtctatggcaaagaaatagatgcgcctcccccacatgctttaataatacccgcaaaacttatgcattatgaaaaagatttcatccaatgttgagagagaaatacaatctttaatatgggaaaagggttttgcttgcttaaggatagcaggctctggctcctctcgatatccagcggcagatttaatagccaaaataaaggacttatatattatagaggtaaaatatactcacaaagattatgtttatataaaagatgagcaattagagcaaattgaattgctatgcaaaaaatttgaagctaaacctttaatagtgataaagttttcccgaaaaggaatctattgtactacgaatttgcgaaataaatatactataaatgatggagatttagttaattttaaagaatggctatctgcagcgcctggtttcttcactaatcagtaatcggcaaactcttcattgctttaatttctatacccctcttttttaaagctttctttaaggttaaagctaaagtaccctctttacaatagatgcaatctcctttcttagttctaataaatttccaaatagatatggggttttcgcaataatctaattcctcttcataactttttataggcaaattagttttcgcttcttttattaagctatctatatttatgtcaattttgtccaaccatttttttattatctcttctttaggttctataacagttttcctacctaatgcacacatctctttaactttaataacataatcatataagcccaattctcttatatactctattacttcttctttgtctaatcccgctataggtctaaatacacttatgctatctaaggttaagctatcaatagtttctaagctttttagggtttgagtacttttttgcccaatagattccccaataaagatagattttaaacctaatttttttgccaaagctttagcagtcttatgcattattatcttaagtaagatttgcctgtatttttcttccacattcattaataattggtaataaacttcgctaaatggtatagaaataaaaatcgaatctggggagaattcttttattttttcataaacttcatatacagttttttctataaaatcgtcgaaagggttaaaataaactattattggtataaccccccttttgatagcaaatatagctgttaaagtggaatcaaaccccccagaaaataaagacaaagctttgccttcactaccatagggcaaacctcctagacctttttcttccgaataataaatataaactttatctcttatgtttattcttattatattgtcaggattttttagattaacttttttatcactatttttttctatataagaaccgacaattttggctatctctaaactattgtaaggaaaattcttatctgctctaataacttttattttgaaagtttttcttggtagccttttagccaattccaaagcatatttttttattgattctaaatctttttctacttctaatgcagggtatattttatttattccaggaacgagctttagttttcttattatttctcctacatctcctttgaatataaataaacccctatctatttttaacacatcgtagggaactttcctttttatatctttaattaatagtttaagcaaaccttttttgcttctttccccttttaagaatatttctccccaactagctagtacagcattatagaacatcttttttatttttcatcttctttaaagtttgctcgtacatttttaggtttccatcgatataatgctttctaaacaattcatttgctattactacttctttgccttctaaaatattatatttaactagcaaagataattgccattctttagcttttaaataagacaatagcgagacaaaatctttgaaatgtcttactctttttattatctctcttaaggtataactattggacaaatcgtttattattgttttgtcgcttttagaatcgtatattgccaaatctataaaggcattttcttccaatgggtctttctcccaatatttggttaattctgtaatttgtactagttttcttttaagtttaagcccatcaattattttgtttaacataacaattatatctactgctttaaatgatgttttaggcactcctaaatcattaacaactctatcatacaaaccataaggggtttcagcatggattgtgcctaaaacgctatgggccaaagctccaaccctcatcgcttcaaacaaagctattgcttccttagatctaacttctcccaaaactaatgctgaatcgcccaatctaagggaagccctaattccatactctgctggcaattcttttgattctatagataatggagattttacttttagagataatacattataacctattctttgcaaatattctgttggtatctctaatacatcttctattgttattattctagtacttaatggtatttccaataacaaagccgttaatagagaggttttgcctgcccctcttgggccagcaattaatatggttctaccaaattctacaaaaaaacttaatagggctgcagattggtaatccagcatttcatattttattaataatggcaaagtccatggtttatctctatgccttctaatggaaaacccatagccatatggagataaaggttttgttactgccgcaaccctaattctattgttttttatttttaactctgtatctaatattgggtttgcttcatccaatggtctgcctgaataaagttttagccttgtaactaatatttctgcttctataggagttagttttatgttggattccaaataaccatactctgtatggtagacaaatatagggttttcccccgttggagggttaatagatatgtcctcaatatttttatcctctaaaattgtttcaataatccctaagcctgcagtgtactttaatagtatagaggagagtttttccaatttatctttagttaggtttatcctataatattgggctagcctaattaaggtatcttttcctaattggtaaaaaacatctcttaaatttgatggttctattaaattggactgcaacggattatagcgagacaattggtatctagctttggaaagcaaatcatactcttcgggagacaaagaaaactctatagggatcaaatggtatttcaatttaataccggtatcaacaatatatatgtttgcttcattagttttataaaaatctataatttttgatttagacgggatttgggttattagcttaacatacataaagcttggcttaattaatgggtaaaacaattccctatatatagttctatcccctatttggtatccaataagtttgtcctttactaaagaaatcatttttgtattgtctaaagatttaatggcttttttgactatagataataggttaaccaattctttactattagttttttcgatctctatttctatttttttctctaaccttttcaaagaaacataagagcttattggatctctaggtaacaatgttattatagtatggtattgttcaaaatatttatctatatatggtatacccgtgggccttggtataaacatatacaaatcactatatatttgggcgatctcttttaacaacgctaattggttataatcatattcgtaactatcaccttgttcaaatattatcgaataaacatcgggaatttgcgttaatagctttatagtaaaatccattatattggggttgtcttctattaatggtatgtcattataattgttggcatcaacaattactatttttttatcctctgtttcctctattttatatggtaacactataacttttcaataacaaaaaataaaaatttcagtttgtaactctctcgtcattactcagcacgccaagaattcatcactctgggtctcttataccttcttcagtaataacgaatgttgtttctctctctggtaagtggggcgaatctactaatctggcaattcttataccttttttaccctttcttaagaatactctataggttgatgcatgtgctaatacatgccctccaacggcttgtactgaatctaggcctggaataaaagaatctggtttagccattacttggtttgttacatatattgccacattatataattcggctatccttaataaatcatgtacatgccttcctaatttgtgttgcctttctgctagctgtcctcttcctgtatattcagctctaaacaaagctgttaaagaatctactacaattaattttattggttctccttttcttattagctcttctgcttttctcgcagcaagcatttggtggtctgtgttaaatactttcatatgatacacattttttaaagctttctttggatctaaatctaatgcttcggccatctgttttattctttctggcctaaatgtaccttctgtatctatatatacggctttcccttctaatcctccttgttctgggggtaattgcacatcaacggctaattggtggcctacttgtgttttaccagaaccatattctccataaaactctgttaatgctgcggtttctatacctccccccaatagggaatctaagtttttggacatagtcgttattctagcagttttttgcctttcctctaatacctcttctgctgttttaaattccaataatcctaatctctccatcgcagcttcaataatttttctggctgtagcttccccaatatctgcagcttccattagttcttctacactcgcggaagcaatttttattaatgaatcgtaaccagcactaattagtttttcagcagtttttgggcctaccccaggtaaagatctaatatcatccttagacataggattagctaaaaataacaaattaaaaaggttgtaataaatttatttgcctaattttttctttagttcttcgaacttcttttcgtcaaaaactaatttaattctacctgttcccatgggggcgggttggttaattaggacatttactattacagcccttagatcatctttttctcctagcaaagcagcatctgccaggtttttgaatggtacttcgaatgtagctctctctagtggggatggtttcctctccattagcccatgcctggtaaatcccaatacttctccatagtatgtcattacatcagcaattaataacagatatctaacatctatttctaaaccttgttcttccaatactttttgtatttcctctattattgcttctctagccgcatctattcctaaaacttttgcaatttcgtgtatatcattagtagtagtacgggttttgtctatacctttcatttttaatacctcttttaaattggaaccgaaggtttttattactaattcatcattttccctagtaatcattgcgtatttgatacctttaaccccttttatatgtaaatcttttattttgttttttaacagatacaactctttgggccttttgtttcctgcctctatagtaatagtattattttcaattttggctttaagctttgcagatttgaacgctttttctaaatctttttttgttatgtctttttctttaactaattgttgatctaattctattataattcttttgttaataacatcgatcgatattgatttagcaatatccgatagctttacttcaattagtttgtttactaactcttctgctaatttttcatcatttttttctaaatatatggtcattgaaggtatagtaggttttttcttcgcatttaatatttctatcaacctgggtaaacctgtaaccaattgtaattctgatacccccgcaaaatggaaagcgtttaatagcatctgagttgcaggttctccaaaggattgtgcagtaattattccaatgggctcttgaggatcaattagagaattcaaatatttctcttctaacttttttaacagttgttccttcttttttcccctaattttatatttttttgccatctcttcaaattcctgcaaaattttctctggcaatagggacacacgggtttacaaatataacttttaaatattttgttatggtagcctaatgggaaaagcaaaaccattaaataggaaaattagattactaaaagaaaacagacatactaaatatgccccaatctgggcagtaataaagaggtatggaaggtttagcccattattgagaatgttaatgactagaaagaagagacattggaggagagattcaacttggatacactaaactttttctagcgattaaaatttttcttcctcttatatcgattattacaccgcttttcaatttttcttgcagttgttttgctatgttaaatctatcttccattcttaatatgtttttgtttatagttacttttactacttctctaacctttaattggttctctatttgctctataactttatcgattccggattttccaatgtttattgtaggcttaatatcataatattggctccttagctttctaagaattttcccttttggtttattcttcaaaaccttcgttagccccaccatatacggattcttttgcttttatatattgccttaccgcattatcaaattcatcaaaattatcggtaacttctaatagctctctccctatatattgggcatcctcgataacagaattaaatacgaaattagtatgatctactgcttttttgtaaaaggttaaataatccctaaccatttcctcaatagtttcataatctttttcatctagctgttttctgaatttctctactacttcttcataataagagcgagcatcctctctttttgtttcatccacctttacaaacctatcgaatacttcatttttctcaacactttttaacctttctcttattacttctttcatggactttttcccaaacatgttattatatttgttacttttataaatagccttataactattagttaatagtaaagacatatttaattaaccaattcttataaccttaatgccatctctgtgggattacctaaataaagataaaaaacctgttataaaaaaggttgaacctccaaaaaagaaagaaataaaaagagacattccattgttcataaaatataggccaaaaactttagatgaagtggagaaccaagagcaagcgaaacaaattttaagagattatgtaataaactataagaaaaaatacaaaggaaaagctttattattgtatggcccaccagggacaggcaaaacttcctctgtatacgctttagccaatgaattaggctatgaagtattggaagttaatgccagcgatgaaagagatgctatacatattcatcatatagtaggggaagcatcaaaagggaaacctttgtttcataaaggtagaataattttggttgatgaagtagacgggttaagtggtaaagaagacagagggggagtaggtgcattagttaatataataaaacaatcatcatggccaataatttgtactgccaatgatccgtgggatcagaaattgaaaaaactaagggaaatctctataatggttgaattcaaaaggctatcaccaaaacatgtatataatgtgctaaaaaagatagtaactaatgagaaaataaaaattagtgacaaaattctatgggatatagcctataaaagcgggggcgatttaagagcagcaataaatgatttggaaacaataataaaatctggaataattgatgaaaactttgtaaaagctttaggaaatagagaacaagaaatagatattttcaaagcattaggtataatgttcaaaaccgaaaacctcgccacagcagtttcagcttttaacaatgttgatttggaatttgacgaaatattcccttggttagaggaaaatatacctgtggaatataaaaggttagacgatatttatagggcatattattggttaggaaaagcagacatatttagaaaaagaataataaaaacacaacattggagattgttggtttatgcccaaatcgatgcttatggggggatagctttggctaaaaacaaaaaatatcctggttttactagataccaaccgccgaaaaggttaaaacttctagctcaaatgaaagaaaagctagaaaaacttagagagcatgtatctaaattgagggaaaaactacatatgagcaaaagagatataataaaatactatgttagttttgcgttaaaactaaaaaacctaaacaaaacagtagcagacaagttcttaaaagcgattgggttatcattaaaagaaattgaagaaattcgctagatttataggaatagacgatggttatttcgttagaaatgtacataaaaaaacaaaactaataggagcaatcacaaagcatacgatattggatggagtattgtctagagaaataacaatagatggtgacgatgttagcgaaaaaataattgatatgataaaaaatagtaatcattattaccaaattagggggataattttgtatggcataacctttgccggatttaatatagcggacgtggaattaatatacaaaaatttgggtttacctataataatagtaatggagcgccctccgaaagatatattctataaagctatagaaaaatacaaacctaatgggatagaattaataaaaaaggctggccccatatataaaacaaaaactcctttcggttatacatattaccaagtttatggtatcgacaaagacactgcttctaatataataaataatttagcaatagtatcaaaaataccagagcctgctagggttgctcatatgattgctagaggtgtaactaaaggggattcatcaaaaccacgggccggcggggattcgaaccccggacctgcgggttaagagcctcggcggccatccccctggtttgtatttgttagccatttaaaaatgtttgtatttaatttttggtattgatagccttttattaaagagtttttctaccaaataatatgtatgtattatattttgcgttaggtataataataagtgctttaaccataatagacccttttgggggtttaataattggtatagcattattagcctccatttatgttaaaagttttatagaaaatagaatcgagcatttccttacaatgcttctaggttttatcataggaatactatcgcaaagctttgggcctatagcctatggaattgccatgttaataacaattttgttagcgatactcgatagtttataaaaagaaattttctaaccacaaatgccacaacatggtaggcatgcccctagaaggggttctatgggattttggcctagaaaaagggcttctcgtatttatcctagaataaaaacttggcctaaaatagaggaaataaaaccattagcttttgcagcttataaagtagggatgactcatacaatattaaacataaatggggaaagagtttttactccagttaccgttttagaagctcctgaattattagttattggagcaaaagcatataaaaaggagaacggtgcattaaaagaaataagctctttatattttaatgacttaccccaatatgtctttagaaaaatcccaaaactaaagaattataattttgaagaaaagaaagaacaattcctatctaaagcagacaatgctgatgaagtaaaaataatagtttctactcaaccatggaaaataaagctaaagaaaaccccagagatatttgacataccaattggaggaagcgatgtaaataaaaaattagaatatgctttatctttattaggaaaagagttatctattaatgatgtgtttaaagaggggcaatatgtagatgttattgcagttacaaagggcaagggcttccaaggtgtaataaaaagattccatgtgcatagaaggcaacacaaatctgaaaaaggtgttagaaaagttggagctattggttctagaggacccggtagaatatttccaacagttccaatgcccggccaaatgggataccatagaagaacagagtataataaactaatcataaaaataggagaaccactaaatgttgaaggcggttgggtgaggtatggccaagtaattgggcctacaatattattaaaaggctctgttccagggccaagaaaaagactaataatccttagagaagctataagacctccaagaaaacaagagaaagttgaagggatagaatatataagtttgtctcccaaaaactaaattcttaatattttatacaaaataactctgggtattcccaaataaggaataacgaagctaactttcccttccacttctttgtacgttattacaaaaggatctatagtgggattattatcgcccttagtgattaaagtgcaatttttataatctttgatataaacaaaatcttttattgttttgttcccacatcgtaagcctataaccctatgtactaatgggtatttcaaatttgctttcattactaatacatcgccaactttagcatcttctttagaagtggaaataacaatgtcaccaacatttataccttggctaaatggtaattgtttaaactttttttcacattcgattaaggataaattccaatatttgcaataccataataagttaaaattgttatgctgcatagatggagttaatataaccaatatagggttttcagatttggttataaattttagtataggagtaaaaataaaattataaaatacaaaaacgaatacaataaaagctaaataacttttgggatcattactaaataaaagccaattgaagaattttttaagcttttctaattctttcattgtgagattttaataaatgccttaaaaattgcttttggttagcaaatacatgcccacaatatgggcatcttaatagttttatgcctgctcttccctctattttaatggcttttgccattcacttttataaaagtttgttttaaaaaatagctatgaagaaagccgctactctgaatttatgatgaagagcctggatgcagatctattcctaatagtttaagcttaaactctaatgctctcaatagtttttcattatcgcttagaattatagataaacctttagtaatccctcccggatacatacgagatgttctaccagaggcttgtatgtaggttttaacatctggtattagaatgttaataccatctcctctctctaaagcaataaagggattttcttccaattttttaattatgtcttccctattaattaattcgaaagatttgtcccttagataaataatatttttccttaactcttctaaaaagccatccaactctttgttttgttctatagcttcttcaaccatctttagtgcaccagtagaaaccctttttatcatattataggtagtatttaattttttcttaaactcttcatcagcgtagtcagataatgttgatgctaataacaatattcttcctatttttgtttctttctcttttgcgctaaacctaaaccttgggatgccaacaaatatggcatatttaactacatggggcaaatctatacctctaacgattaacccataataatgagctacccctactaatacatctaattctttgttggcatatttgtctaataattctatagatttacctgagtaaaatgcttctgcttttatgttgttttcttttaaatattgggctatttcttctgctttttcaataccataatctgttggtacaaaaaccaaaccaccgtttcccaattttttaattaattctaaagtttgttttttatagtctctcatctctgtataaacatcaattatgtttcttattgttgttttagcagctccaacttcgaaacctaatagttctctaaatagttttacccttagccctctcatagaaccagttgcagatgccgctattaatatacctctttgttcttttctaactaattcctttaattgttcttccatttttcttattttttctaagtcttttcctgaaatttttagctttattaattgcatcgctttttctattgtagtttcactaaatcctaatagatataaaatgcgatcgatatttttactgcttttcattatagaatctacatcatcggcaaaaattatatcgaaataattgttttttagcaaatcaaaattcctgcttaagaattggttcgatgttattagtatagaaaatgccccatctttgattagctcttttgcttctttcttttgcttgttatttccatagtatgccacaataatattatcaaacccaaccctctcggcaaaaacatttatcttttcatataattgtttaaccaaagttctagttggcactataatatatacctttttaccttttttaccccaatatagggcatttactaaagcgaaagtggtttttcccattccagtaggggctattatagaaaaagaatatcccttataagctctaatgaaccatgctctttgtgcagaccaaggtttattgtttacagctttgtaaaagaattcttcaaattcttttttggctttttctatgttataaatattggcccaatcttttagtttattgttttcctttagatattcgtaaacttgttcaattgtgccttcctcataagggtaatcgttttcacatggcaaacccttaattaatctttcattagatattctcccagaacaattggggcaaacattattataatagattttcatttaacaataactgagagcaatattaaaaatgctgaacatcgggtatactgaatagtgatgattagctgtaaagttcttttatccttttttctctatattgctctaggattttcttaatatctatttcttctttttcttcttttctctcagtttctattttaattgttatggtaagcttttgcatttctaatagctgggaaatcttttttcttaatgccatgttttcctctattagaaaatcgattttttgcttatactcctcaattattgaagagcaattcggggtaggaagcgatttctttttaatttcttttttctcttctattttaaattcgctatccagaacatcggtaatggaaatgccattttttattattttttcaaatatactatctacagttagctcttccagttttttctctatctttttgattaatgggctataatagttcaaagcgaatactgctgaggcaattgcatctctttcgtggttgtcattagggctataatcttttgctaattctttttttaatgatactggtaaatcgtcctttggagagaatattttgctttttaatttcatggctaacctttctacagctttagggataatttttttgtctgtagcaataactaaaggtttcccatacctatggattactgaaattatttcttcctctctgaaatcctttttagatatcttatataataggtttccttttaagtcaaatatcgctatagcgctgtattccccagggtcgtaccctataattagacctctcacttagttaatgttttttatgagaatttaaaaattctaataccctttctaatgctctaatatatgcaggcctcgttataaatgccccaattattaaacctattaatgttgttaatgcaaaacctttcattaacgatgcagcagcaaaggccaatgctattaatgctaaacctgtagtaacgaatgctctaactataaattgtaatgccttctttataccggtctttttatgtctaagtaattcatccgtagaaataattagataatctactccagtaccgacagttaataaaatacctgctatagatgctatatctaaaacccaatttatgagagaagcaacaacaacaatcaaaaatatttcagataataatgctattcccattagaattgctataataatagaaacaattaagtctttatatactagggcgtatctaactaatataaatgctataactgctattagagctatagctaaatcttgtaacacattttttagaaaggattggcccgcactcggtattatattttcttcactaactatttcaggttttacagggaaagacccacttaataatatggtttgtaaatatttcattcttccgtaggcattttttatcgcatcgatctttgtttctcctactccaaacccagtaatagagaacacagtcgcttcttttccttttaaagaaggatctatattaagcttagttattagtttgttgtccaaatagaagtctattgttttatttaatgttactgtaccatttttctcaactatagataaatttttagttaataaagcgaatctttttgctgcatctttatcaatccatacagcaaacctatattggcatacccatccttcttttgaaggcttacaagtttttagatctaccccactacagctcggggataaacatacccttattatgtctttcccggtataaactgttgtgttatcaattttagcttcaaatttaccttctcttaatatagattttaatttatcctctaattcggtaggcaactctataataatataattaccgctcttgtatattcttacatcgcttattcctaagctatttaatctcgcttccaaaactgtatataccgcatctacatcttctttagtgccattaacatacaatataacccttttccctcctacaatatcgataccaaattttattttgctttcataaacaacctctggattttttattgtttttacgctattatttaataaaatggttgcgtaatggtcttttatttccaatggtttgtataatttgttattatatttaacataaacctttgaagggagagctagatatattaacccaaaagcgatagcaactatataagctattaatggtatatctcttagcttaatcattggttctttttgttttgttctttattaagcaatagcaacaaagagccattttggatccaggtatttattatatcgaatgttagccctactaataatactaaggccatactttttagtatttcgttttgcgagaataataatattactatcaaagctattatggttgttaatgttaaggacaacccagtaattaaagcttctttgtaattaccttcttctaatactttttccgatagcaatatgtttgtatccacagaataacctacaaacataaatagactggccaaagaggctatagaaaatttaaatcctattaaatttagaaaggctaaagtatctataacattagatactaaagccaatatcgttaatgccggaatcaatgggtttttgaagaaaaagaacaaagaaacacctactgccaaaaatgaaaatataaaagcactaattagagatttataaaagttggatgccactgtaggtttgaattccctatagcttacattgtatttagatttgattttgtttgcctcttcataaggtacatctattatataatattggtctgtttcctttattattgcatttttgaattccgttaaatttaatgtttggttttttggaatatagaattctacaccccctgctaaggaaacatcttttttaataggcgagggagaagttacaagaacatatatgctaaataataatatagataggctaaaagctagtcctatcaatttctttttcattcactttttatagggctattattaaaaatagtatgaaaaaatttcaatctatagaattaagagttttgctcgaagaaaaccctatcgagggttatatagaaaaaatattcttttgcgataacgatttggttatagcttattctcataaaggtaaaagatatctaatagtaaaacctgggttagttttttatggagaaaccgagattatgtgtaacaaaaagaaaactagattctctttagtcttagaaaaatatttggagcacaaaaaaatattgaatgccaaaataataaatagtgaaagactattattgatagaattccaggactataatttatatatggagttttaccctcctggaattatagtattaactgacaaaaacaatacaatattggaaactaatataacgaaaaactttggatggcgtgttatagaaaagggcaaaccctatatttataggcaatccccaaacccttttgatatcgaatccttctataagctaaaagagagtgataaaaaagatttagttagagctttagccatagatttaggtttcggtaaagtttatgctaacgaattgttattaagaacaaacatagaaaataaaagccctaaacttttaaccgataaggaaatagagcttttgtataatagttttattgaattatataatgataggaaaccagcaatagttaataacgatgtggtgccttttaatctattatattataaggattatgaaaaaatttattttccaacctatacacaagcagtaaaggaatttctaaaagagaaagaagagacaaaaattaaacatatagaagaaacaatcaaaaaattggaggagctttacaattattataaggagattggcgataaactaatgcaaaaccagtattatttagagcaactaaggcaaaacataattattgcagcaaaacaatatggttgggaaaaagtgaaaaaatatttagaaagtaggggtattattgttaacgaaaaagaaggttattttgaaatagacttatgaagggcatagtattaaaaggaccagattattatctatcttatttcgaactaaaaagggttgctaaagcatataatgataaaatagaaagagtatctaaaaagttggttttagtaaatgatgggcaatacttcgatagactgggcttatcaaaatatttgttcgaagtaaaaataatagaagaaccagacagattttatttagataaaccgataaaccctataataataaaagagcaaaattataatatatctaatagaattaaaatggattttaaaggggaaaaatgggttattgttaaatccgacaaagtttatgccggtcccctattgaaaataaatcgaattccaaaggagcgcttacctcataataaaccatgtttccatccttcatcgataataccaactttggctaaagttcttataaacttaactggtttaaaagaaggaacaatttatgatcctttttgcggtattggtggtattctaatagaagcagcattgatgggtttccaagttaaaggtagtgatatagatgaaaaaatgttggaatgtgcgaaacaaaaccttctttattatgggataaaagaattcgaattagctaaatgtgatgctagagacttatgtttagatggagatgccatagttacagaccccccatatgggaggtatagcaaagtgtatggtaatattttagaactatacaaaggttttttgagcaaagcgatagagaaaaatataaatatagtctctatgctatatccagaatttttaaatcctgaattgtttgtacctaagggatataaaatactgttagatcggccatgggtttctccagggataagaaggcactttttattacttgaaaggagaaacaaaaacgaataaattttgattatacaattttgtatgagatcaattttagccttgctaattttagggatagctttgtctataaaaatacccttgttagattcgctattcgaattcgataaaaacactggagaaataagaataaaaaagttaatacaagattttgtaaaaataaatagtaccgtaagcttattaagtaacactagtattggtaaaggctctaaaatagtaattgaaaaaggaggcaaattaatagtgccaaataaaaacaaagaaactattaaagttaaagccgagtactatatagaattccctatagcaagatggatacaaaaggttactatacataatcccaacaattacgctataaataattataccttaattattaatattgattcaaaattgggaaaagcgaaagaattattcgcaaactctgcaaatagtgaattaaagcaatatcaatattttgttgcatttgatagtaaggaagttttgcctttctgttatttagatagcgaaggtttttgtactgatacagtaacaaataaaatagctgttaagattgatgaattaaagccaggacaaacttacacattttacattggtttaacaaacaaagattattcttctcctccaaaagatgtgtttctattctatgctgattttgaaaatgatataaataaccttgcatcgcttagagagtattttgatgtgtatgcaaataacaacccttgtataactgcatgggattcaaatggtcttcctttgacttgcgggggatatagccaagttacaacaatttcaccaaaagtgaatatttcattggagacaccattagaaataaaagtaaaatacaaagcaataaaaattagggattatgttgcagacggcttcgctgttagtttatttaggaaatgctcaacacataattcgttacctggagaatccttaggaacatgttacaacaataatggtattatagtagaagaagacttctggcaaaattctgaagacccaactgctcaccatttctcaatagactacaaccatgtgcataatatcgtatcctgggttgatttgggaagcttcatagatggcaatagaacaatggttataaaaataaaacccagttcaagagttagagtagatgcggctttgtattataatgataattggtataatattagtgccgaattggataaaccaaatggagatgctataacattttctgctgccactggaggagaaatttcaaaagtatacctaaagaaaatcgctatactaagaaatgacgatgtttcagttagtacttcaattattaagcaacccgacaatgttaactttgattaccaaatgaataccacgctatatacattctcttctaaatgggataggtttactgtaacatttaatgaatacagctccctctatagattggtaaatgacgatagtttaaacattgccccgggctgtgttatgcatttatatggatgcaatgacccatcttcaataaaagtgggtaaaacaatatttaaagtgaaaaacggggattatattagaataccatggggcactgagcccagcgatgaacctaattctatttacgactattatatagatggtaacaacttctttgatttagtaagtatatacgatctttcctgccctagctctccaaaatgttggaacaacccagcaagctattgtgaaaaaagaagagataacatatatcctacatattggaatagctatgtaacttatgtaaatataagaagcaacggcaattgtggtactgctataaataataagacaacttattgggtttgcggagaaataataaaattcccatttggtttgggagattatgaagaaatcgatttaagttatagggccaaagagtatagatggaattctaattttgtatggtatttcccaggaaaagaagttgcaggttttgtggcttggaacaaccataatataagggttggcgatatagatagtggggtaccacatagcaacatccgctatatacaatactatattaaatacaagaacaatatattgagcgttagcacatcgcacgggttgcctacttttagcaaatattatacaggtaatttagatagactatatctaagaactggtactcatatgtgttcaagtgaaagcggtagaaactggtggtatatattctttgttgcaaaaaggaaaattggggacataaaaagtgaaaaacaagcgccattagtatacaaagttaaagtaggcggtactatagaaggggacaaagattatgtcaaaaaaatgatagaaaaatacaaaaactatgtaaaaaacataaaagtatatgtagatatctagtcttcttcaaaaatttgtccttcgaaaacatatacttcggtttttgggtctaaccaacaatccattggtaagcctgcttttaagcagccataggataaaaactctttagcgtcccaaccttcttctataggaacttggggcaataataaaccggaatatgggccccttttaattattataccatgtttgccgatttttattttttccaaatactctaatgggttattaactattaactttcttggaggggttaaaacagtaacctcaaatttcacattatctaactcttctttttgtaatggtggaaaccttggatcttcaaaagcggccattaaagcgctgtattttagggattgccatagagggtatattggatatggtatccccatacaacctcttaattggttgtccaaagtttttatcgttgtaaacgcaccagctttatagtttagtttttcttttatttcatcgggtatttcgtaatctttaccttctaaagcgtattcaactatttttctcgctatcttcgctaggttcattgtttttattgtctcccatatttaaagatcttttaagaccataataagcttttgcttcttttaatatttctttaacaaaatcatcacacacttcaaatattttatttttgtgctcttctattttcagtttcgctgtaatcaaatcgctaaccatttttattatatctataagctttgggttctcctttgtttcttcttttatatctataaccaaatttttacaagcaatatttatagaaccccaatcgacatcaatattattttgtttaattctatcaaaattaaattcgaaagaaatagaaaatttatatgtatgtatgtcatcagcttttttactacaatctaaattgaaacttatattcttctttccattctctaatttttcagtatactcttttaattgtacatcaatttttttgtttttggcaatctcaaaaattttatcaaaaatttgttggaatataaaagggccttcataattatattttctaccctccaagcttaccaataaggtagccataaagaaatgttgcactgtggtttataactattttgtaagggatacataagcctattaatgatcaatgatcaaaacttaatatgttcagaaggagcataaccccaattattgcagtagtaatgatgttaatgatgactgtgatggctgcaggtgcggtatttacatggtatcaacaattccaacaacaacaattacaaaaggtaacaaaaagcgctgctgctttagctaaaaacatagccttcgcggttaatgaagctaggtggaataacaaatatggggaatccaaagaattcgatacaaatggcgataataccaacgatctaaaagtaacatatgtaacattccaattcacaattactaattctggagatgatatggatttgaactctaaaaacccattagcctttgctgcgttgtctgaattaactacaggtactccaatagtacaaagctctccaggtgttttagtagttgacaaaactaatagcttaaatgtttacccaacaaaccttaattttgctaataacaaagttgatttgactaccccatccaatgagcaagtaacaatagtagatgtaggaaataatgcattaacaaacccattagtatgttatagggttgtaaccacagaattaaaccatccaataaatatagttgcatctggagaaacagcgaggtttaactgtatggctgtaattaaggttgaaacatctacagatggaactacttggaatgcagtagattactctccaaaaggttatgatgcaaccaaagattacaatatagaagtccattatggtgcagtaacacaagtggcacaaattcaataaattctttgaatgaaatctcagtcacatttaattgagtttgttttggttattgggatagctttagcgggtttgtcttcagcattaatgtgggccaaacctttatggaataaatctttttcgaaaaccaaatatttaaaattcgttgatagcgcaaaagagatatacaaagccttaattaacattgataaaataaaggaaaaaacatttaacatagaatatgataagctttatgctaacgaaacctttatggaaatctcgataaaagggaacttttttaagggtattatgggttattggtttcctttagttgaaggcatctatggggttaaccctataaatggaaaactagagacaaaccaaacccaatatttggttttaccttatattaaaattactccgaacgaggttaaggttagatattatttcccttatgctaaaaaatccgataaattatgctataaactattaccccaagaaacgatcaaaacgaatgggaatagcataaccattcgagttatggatgtacaatacaaaaacgaaccttgccctgttacgatagtttacacattatatattgcataaaggtttttaaatcctactcaagacattaccaaatcttatgacctcggggagtaattccccgagcgaggctgatgcttaagatgaggccaccaccgtccgcaggaccgctgaccccgcccggtggatgcctgggctcgggagccgaagaagggcgtggcaagctgcgataagccagggggaggcgcacgcagccgttgatccctggatccccgaatgggacctcctgcccgggggttaaccccgggcgccccgataaggggcgggaacgcggggaagtgaaacatctcagtacccgcaggaaaagaaagagaaattcgatggcgggagtaggggcgaccgaaaccgccgtagcccaaactgaatcccgtagggaaacctacgggagatgtggggttgttgggggtggcggctttccctcccgcgggaacccgaactccggtggaagtccggggccgtagagggtgacagccccgtaggggtaaccgcggagggagtgccgccacttccagagtaccgcgcctcggatatggcgcgggaagctgggggacacacgcccccaaggctaaatactccccgagtccgatagcggactagtagggtgaccgaaaggtgaaagagaacccgtggaagggagtgaaaaagagcctgaaaccgggcggggatagtcaggtggggccggttaagcccccgggcaaggaacccccggcgacggggtagtacttgcccgggggctagccggttccaccgtacgttcgggagcacgtgcgggggagtgtgcccgagtggcgaggttaaggggataaaccccgaagccgtagggaaaccgaaggcccgcagcccttatgggcgaggggccgcgtcctatacgggcgtaagtcactcgggcacgaccagaagcccggcgatctaccccggggcagggtgaagcggggtttttccccgtggaggcccgaaggggtggtggcctatcccctcctctgaccccggggtaggggcgatataccaatcgagccgggtgatagctggttcccgccgaaatgggctgcagtccagcctcggcggaggcaccctcgggtgtagagcgacggattcccgtggcaagggggttaaccccaccacgggagtccaactccgaagcccgaggggccgtagatgccgggagacgggggcggcggataagccgccgttccgagacgggaacaaccgagaccggggttaaggcccctaagtgccggctaagtggctggaagggtgtccgctccctaagacaccggggatgtgggactagtagtgtccatcatctaaggagtgtgcaacaactcacccggcgagggagcgggccccgcagatggacgggcctaagccggccgccgagaccccgggccggggatccgatggatccccgtgcggtaggcgggcgtcccggtggcctagaaggcgggccgtgaggtccgctggagccgccgggaatgagaatccccgcgtgagtaggagcaaagaggggtgagaagcccctccgccgaaagggaaaagggttccctggcaatgaccatcagccaggggtgagtcggtcctaaggccggcggtaactccgctcggccgaaagggaaaggggttaatattcccctaccgcccgggtaggcgcggcaacgccaagccctactcccgacgcctggggctaggccgaccgcggatttcccgcggccaaccgggatagggccggggagtgccattatggcgagaaccggcctaaacccgggacggggcccccgtatgggggcttcggccgaggccctgggcccatgaaaagggagtagggaacgatcccgggcgaccgtaccgagaaccgtgacaggttccctgggtgagcagcctaaggcggtggggtataacctggccgagggaaatcggcaaattggccccgtatcttcggtagaaggggtgcctgcggtcgtggggtaatcctgcgaccgcaggtcgcagtgacaagggcgggccgactgtttactaaaaacatagcctccggcaagcccgaaagggtgtgtaccggaggtgacgcctgcccagtgccggtacctgaaccccccgtccaagggggctaagggccggtaaacggcgggagtaactgtaactctcttaaggtagcgtagtcccttgccggttaaatgccggctctgcgaacggcgtaacgagctcgccactgtcctcggccagggccccctgaaaacgccgttcccgtggataggcgggagaggcccggtgggaagagaagaccccgtgaagcttaaccgcagcctgtcgttgccccgttgtcccccacgctcagcgtagcggggagcgatgaaccggcccctccgggggtcggggatgcgcccatgagacacccgccgtgggggacaacggggctaaccccgaaagggggacagcggcaggtgggcggtttggctggggcggcacaccgccgaaaagatatcggcggtgcccaaaggtcggctcaggcgggtcagaaatccgccgtagagtgcaagggcaaaagccggcctgacacggccctttacaaggggccgtggcgggaaaccgcggcctagcgaaccccggtagcccccgtgtggggcttcgggacgacggaaaagctactccgggggtaacagcttggtcgcgggcgaaagttcccatcgaccccgcggtttgagacctcgatgtcggctcttctcaccctggccgtgcagcagcggccaagggtgggggtgttcacccattaaagaggaacgtgagctgggtttagtacgccgcgaggcagtgtggattctatctaccgggcctgttcggcggctgaggggaaggacggcctagtacgaaaggaacggccgtccggcgcctctagtcgacggggtgtccgtatgggcagccccggcagccacgcgctagggggtaagggctgaatgcatctaagcccgaacccctccccgaaaagagccgccgatccccctcgggtagaagacccggttgatgggggggcggtggaagccccgagggtttccgaggggcgagccggcccctcccaatcggggggtggtcctgcggacggtggtggccgagataaaatatttaaacacttcttttatcaattctagtgaaacatctagttgtatctgctaaaagaaaaacatcaatagccagagcatactttagagaaggcaatggaataataagaatcaatggatttttattagaagtatggcaaaacccattagcaagagcaagagtaaaagagcccttaataatagcagaaaacattattccaggaataactaaagagattgatattaatgttaatgtatttggtggaggatggcattctcaaaccgaagcagtgaggcaagcaatcgctaggggtttagtagtatggacaggtagcgatcaattaaagaaagctttcttagaatatgataattggttattagttaacgacccaagaaggaaagaacaaaacaaatcccttagatctaagccaagggcttggagacaaacttcttacagatgaaggcaataaattatactatcgtttcctttgtattattggtaacaattggtttagcactattataccaactaacacccatatttaatttaagcaaatatgagaaaaaggaatgtctaatagatataaagaagttctctgttttaggtaaccaattgaacataaatttggattataacaaatattgctataggtttgacatagctataaaaaacaacaaaaaaacattatgcacttttacagaggtccctaaaaatgttataaccttaactcttaataattgcaacctaactcatggcaaacaatatatattatctataaacggaaaagatctgacaactttctattacccttaatataaaatatgaacataaatggcacaataatataactaaaggcaaaccaacttattgtatgcatagtattaacaatatcgcaaggcatataagatattacaattacccttactaaattaatcacaaatattagtagagaataaaaaacgaacttttttgcataaaattttttgtatgctaatgcataggccacaaccaatatagcaaaagagacaacattttttatcccaaggcagtcatatgttatatcgattatacatctattatttattatcgcactataatgtgttggcctcccaaagcttattagttttgcaaaaacagatctatctattggtagctctatatataataaaggagatagagctaatacaataaggaaaaagtatagcttagaatttccattcaaaaggttttggtttcctttcaattggtttttctattgtaggagtaggtggctcgattggttgtggtttactaacaaggctctcccttatttcagataagcttttgtttaatgttcttatactattagccaaatccgcgatgcttgcttttatctcttcaaactcttgttgcattgtttttatttgtttttctaaattagaaacatctggagcaacagtttctttagccgcttcctccattaaactaattagattatctattctttttactaaatcattaataccaactattaattcggaaactttagcatttagttctaggtttactttgactaaagaggacaccatttgttggttggctttagcaaagtctaatacttcttttattacttctttggattcttccctttcttttttaagcttttcaatttcttgcattattttttgtattgggtctggcactatttcatattcatccatagataagggtgttctctttaaataaaaacaatcttgaataactaattagtaattaaagagctaatggctttccagattttacttcaactatttcttccctatatctccaaggtaacttggatcttgctacttgtaaaaaatattttatgtcttttgcttttgttatatcatcgaaaaatattgataatagcttttctccttcatatatttggacagcccttccttttggtctgccaaagcttaatctcataccttgactaattctgtctgctccagcataaccacccaccactggtttttccctgtatatgtggtgggggtatttccttattataaatagatacctctttttacctaaagtgctttccaaatatttgttaaccataactcttatagcttctattgcgttatccctaatttgatggttttctttagctactaaagatgcttcatattgccattcgcttggatttctggttagctctcccatatggaataacctaaccattgtgggttttgccccaggtatatagtttttgtttttagatcttgataccctagtataagggacttccaattttctatagcagtgccatctccttaggcgcgccatcgagttaaaataaaaaagcttttataaataaataacatattcgcttatatgctattatatttagttaacttccaatctatgtgggcaaactatgttttagaattattaaaagatgcttttgcatttaaaataaaagcgaaagaattagatatacctttagcagcatacaacccatttagaaaacaatttagcgcccaactattattggattacgttgtagaaagatataaagatgggttagtgtttgctataattgatgaagacatatacgatagcaattataattttgttttcggtttagcttatccctttagaggggcaatagtttctacctatagactaaaaaacttcgaaagaattaaaaaagaggttttacatgaaatggggcatgtttttgggttagggcattgtaataactattgtgtaatgcgcttctctaattcggtttttgaagtagatgaaaagcccgataaatattgcgaaaattgctatagggaaattttaaacaatggattttatgttaatcccaaatatgtcatttttaaagaaaattataactaaactttaatgactataactttatatcttgataagccaccatggtttgcaaaccttttaagaaggctaattatggaagaagccccttcgatggcgatagaagatgtttatgtacatcaaaataatgtatattggaatgaatggtttgccaatagattaggtttaatccctatatatgctccaatagactatataaaaaatgacaaggtcgtaaaagcttccttaaaagtaaaagacagggaaggctgggtttatgctgatgaaataaaaatagaagacgaaaatgtgaaaattgcctataaaaaaataccattgatttgggttgaaaagtggcatgaaatagatatggagttcgaaataaaagttgggcaaggcaaagttcattctaaatggataccagcacatacatggtattataaagaagtttacggcatactaaagaaaaaggacaataaaacaaaagaactaataaattctttagggctaaaaattgatggaaataaagtttatggggatagaaccaaattagaagctttagagaaagaaggaattttagagctaaaagagacaggaagaatagtatttaatatagagggctttggcatggtggaggaaaaagaaatattgcctttagcaatagatgttttcgttaataggttagacgaatacataaaaactctaagcaatgagtaatatagagaaacaaataatagagatattaaagaagaaacctaagggcgcaactataaaagagattgctgaagagttaggaataaataaaatgactgctttaaggtatttagaggttcttaaaactaaaggaatagttgattatgaagaaaataggagggccaaaatttggtatgttgttggagagacctctttattagaaatattcaaaagcgagaaaccatatttgaaattcctaaaatacgagcaaggcaatattttattgctagacgatatattaatggttgttttgcctgcatcttttttctctaatatttatgatttatatggggaagaagcaagccaaaaattataccaattaggttacgaatttggaaaaacactatcttttatatatgaaataaatactggggttaaagtatccaatataggcttattgcctgcaacagttaggtctttgctaagctttttcttaagagggggctttggagagttagaaaaaattgaggattataaagacaaaatggtaataaaaataaaaaatagtttatttcctaaaattttagaaggaaaaggcaagaaatgccatttcttagctggttacatagcagggatagctaatgttttaacaggcaaaaacttaaaagtttatgaatccaaatgtgttggagaaggttataactattgtgaattcgtgataatgaagaatgattcaaccgctgaataatgatgaattcagccttggctgacccacatttttggatataaaccaggtttcataaatactctttctatatctacagctattcctcttttcttttctaacatttctttagaatccataagggctataccaatagcaactaattctccttttaatgtatgtatcgaaactaaatcgcctttctttatattgctataaagcttggctattcctggcactgctaaattggccccatgcacaattgcagcaacagcactatctaaaatatatatttttttcaaatgttttacagcctcttctacaggtaaaaacactttccttatatattcttcgttcccttcttctttccaaaaatatagagaatccactatgtcttgcaaatataccgaattgttttcatggaatggcccagactttattcttcttaattcttgcatatgtgccccaactccaagctttactcctatatcatggattagctttctaatatatactcccccttgggtagaaactctaaataaaacatctttcccatctatctctattattttaatacaataaacttttttctttctaggtctcttttttacagcacttctcaatgggggggtttgtattatagtacctacaaatttggacataactttaattatatctttttcgctaacttctttatgcaaatgcattagagctacatactctttacctgctattaacaaagtttgtaaaacttttgtggcttctccaattgctataggcaataccccagttacttttgggtctaaagtaccaccatggcccgcttttacaccaactatgtctcttacccacgctacaacttgatgtgaagtgggcccagaaggtttgtccaaatttattacagaatattttaataatctctctattggtctattataaggatcttcgccccatttttcattagtttcagcttcttttttaacccatatttcatatttttctaactcccatggtaaagggcattcctgctcttctaaacatttagagcagaatattcgcataagacttaaacataacacattataaaaattatgctatttctattcgccacaataataggagtaatactaggaataattcctataatacatccgaacaatgttatacctttgttaaattatttgcctttagataaaatagatttgtctataatggccatctcttttttattgggttttagcttttcctctataattcctacagccctattaggttatcctgaaaaatgctttagctttgcccccatcgattagattattgaaagaaggcaaagcctgggagttaattttatataatttgtatggtagccttgttgggggtatattagctttgttgtttatcccttttaattccctatgtgggaatactaactaaaatattgattaaacataagctattgccgtttattttgtttataataatggggtatttgtttgcaatagacaaaagagcaaaaactttagaaattattgttttggcctctttattagggttagtgacatataatttaactgtaaaaaacaagcttacagctttgttaacaggtttatttggattgccatatttaataacaatatacaaaggcaaaaaaccctctttcaatactaaaaacaaagaaataatagagataaaacctgctttagttggggttttagctgtgctattagcttcaataattcctacattgtctccatctatagcgatattctttatacaaaaattatttaatataaaaggagatttaccttttgtttacgctttaggttctttaacaacagcagatgttgttatatctttagcgaatttctattttaatggctccgcaagaaatggtgctatagtttttgtcaagaatttactaggaaaaatagattttaatacttttctgttgtttttggctaacacaattgttagcataattatagcttttattgccacatatgtttttgctaaacatttgataaaatacgaaatagatgttagaaagattaaaccaattttgataggttttataataatatacctaatagcagtttctggttttgttgggttattaatagcattaacagcaatgtttgttggtttagaagcaataaaaaataatataaattacagcactttgggtgtggcattaatgttcccattagctataaatatattgcttagttaatacaaatgatgatcgtttaccggcactgattagtgatgtggttcaggtaccggctgatatttaaaatggcttttcttaaaatttaatgcgtatcctagttactgcggctttgccatattcgaatgggccaatccatttgggccatatcgctggggcttatctgccagcagatatattttatagattcgtaaaactaaaaggatataatgcattgtacatatgtgggtctgaccaatatggatcgcctatcgaattaaacgcaataaaactaaacatagatccaaaggactatgcttcattctatagaaaaatacaagaagagattttcaaaaaatttaacataaaatttgatatatattcaggaacggccgaatccaatatacatcctataatagtaaaggaattctttttatcattatttagtgcaggccttttaatagaaaaagaacaagaattgccatatgatcctaaaataaaaagatttttaccggatcgatttgttgtagggcaatgtccctattgtgggtatgaaaaagcctatggggatcaatgtgaaaaatgtggtagactattagagcctaaagagttaattaatcctaaaagtgccataactggagaaaaagtaattttcaaaaagacgagacatttgtttttcaatattccaaaattaaaagataaactaaaacaatacattgaatctaaaaaggatgtatggaatgattttacatacagttggtctttagcattattggataactttaaagaaagggcaataactagagataacaaatggggcgtaaaagttcccgctaaggagatgttagaaatattaaaaaaagctctaaaagaaggaaaaaccccaaaagatttcggtttattaattgatagtactaacgaaaaagatttagaaaatcatataaaagaatacgaaaacaaggttttatatgtatggtttgatgcgcccatagggtatatatcttttacttttgagacttctcctgaatatagatattattgggacgaaaaagaaaaaccttatatagtgcattttattgggaaagacaatattcctttccatacaatattttggcctgcattaataattgggcgaaatttgggatataaaaatataaaccatatattagatttcgatatagctttgccttaccaagtatttggtaatccttatctaaactattatggcaaaaaattctcaaaaagcaaaaggtggggggtatttttggataacatagataaaatagatatagatatagactatttcagattctatttagcctacattcatacagtgtctaaagatatgtctttcgaatgggaccaattcaaagaagtaataaacaaagaattagtcgataacattggcaattttatccatagggttttaacctttatatacaatagatttaatggtattcccccaaaaatagagcatctagacgacaaagataaagaacttttagataaaataaagcaattacccgaaaaagtgtttaactttatatggaagggcgaaattggaaatgccttaagagagatcgttaatacctctaatttggctaacaaatatttccaagaaaaagagccatggaaaactaatgatccaaatactattgctattgctttcgaagcagtaaaaacctttataattctgttatatccatttattccggaaaaggccaaactattagcgtctatagctaatatagatataaaatgggatttcaatcaaaaagtagaaaaaataaacaaaccatttatcgttttccacaaattaagcgataaccaaatagaaatggcaaagcaaatcttaaccaatccaaaagaatatgatttgggtaaaaagaaagttataggtgttttaagatatgaagatgagttatataaaatagaattagaatgtgacgacaacccatgggtttgtctaaaaagagagttagataaaagaaaaataaaatacatatatgatacagttaaaggggatgtacccccacatataatagatggcaatacttatatatatttattgccggcattagagaaacccaatttagaaaaggcagaagaagaatatggcttagttagctatttggattttgctaaactagacatgagagttggtaaaattatagatgtgcaagaccacccaaatgcggataagctttatataataaaagtaagccttggcaataaacaaaaaaccttagttgggggactaaagcaatattataaaaaagaagagctaataggaaagtacgtagttttaataaataacttaaagcctaaacaattaagaggaataacatcagaaggaatgctattagctgcagacgatggtaaagaggtagcattattaatgccggacaaaccaattagtttaggttcaaaagttcgttaaaatttttgtctatttgtgattctacttcttcaaaatctaacccttttattttagcgatctcttctatggcatatttaactttgtatggtctattatttctattgccctctgggtctaagaatgggctatcagtttcggtaaacattttttccaatggggtatccctagcaattttctttaaccttttgttttttacaattattgctgggatagaaatataatatcctaaatctaaagctttgtttaaagcgattttccaatcttttttgggcataaagctatgcattactgctttaatattataggattccattatttccaaacaatccaattccgcatctctagaatgtattattactggttttttaatagattcggccaattccaatagctttctaaaataatgtttttgtttatcgatttcttttttgtctttgtgccaataatagtctaagcctatttctcctactccaatacatttactgttttcgcataaattttttatttgttttattgttttttctatttctaattctgatagctttactacctctgttggatgtaggccggcactaaaatagacattttcctgttttgattcttctaaaactatttcgttagtttcatagttaagcccgctctctactactatcatatcccttatttcctctatgcatttacctaccataaagcaatgtgcatgtatatcaagcatttacaataacacaaaatagttttaaattctaacattaataccattagtgaggggaataaacgcgctaatagcaattattgttttagtggcaatagtgggtttagctgctgtaagcgttataagctttgtacaaaaatccatatcgcaacaacaaaaagagataatacaaaaaaatgaatttaacaaattccatactatagggaaaatagccattagaacggaaaccccttatgcggacaaagatactatagtaaatattagaatagatttgaaaccagtacaagatatagtatctaaatacggcagttttgccttatgtgatgacccaagctgttctggaaatagatattattattgctgggaaactcctaatggggaatgtgtaagagatttgaacaaaaattggaataaatatattatttgggttagaattgatagattctattcgcccattgtcctatatatggtttatgggaagggcaaaacaaatgttgacgggaaagacatatttttattatatacaaacggttcttatttagatggttttgaatcccaaggggaagttacaacaaacaatggaataatagagctaaaaaatgcgtcttctttagttactaatagttatgcgattaaagaaaaatacaatttagttgctcgattacaattccaaatcaaaaacaataacaaaacaacaattagttttaatgtaaccgaccaagtatatattaaagggctagatgtctataaaggaaacgaaaaaataacaactttggaagcaaataccaattatttatatataaacaaattgcaaggctatcctaaagagaatatatacattataaaaggaaaacaaatagttttaccttatggaaatgataaagtctcttttacaataaaaacaacagacaattcagatgtgttaatagattggattatgctatattacgaaccaataaatgttaatgtgtatgtagaaaaagaataatgggcccgcggggattcgaaccccggacctccgggacccaaacccggcgtcctagccaggctagactacgggcccagagtttgcaaaactaaatatttaaaaattataatttatttattgcttccaaaattctttcataacatgccattggtattctaaatgtgccttcccattcatctaaagtattgcctttagagtctttaattactatctttggtactccatatacattgtatttgtccgcccaatctgggaattcatatgcctctatcatataagcgtgcactttattagaaattaatcctaattgatgggttgcttctgtagcataaggacaattgggacatgttggagtaataaaaacataaacatatattggttcttgcaacttttgatctatctcttttgctagctctattgcttttggtggtagcattggttcgccagtaccttttgttactatgtcatctaaaaatggaggcatttcttctccgaaaggcaaaccataatatctaacattagggctatcttcgaaaaatagtatgggcccacaatatttagattccccttcagggcaaaattcttttttctcacttttatcataaactttatagtctatcttgccattacttatttcttttaaatcggacaataacatttcggccatttcattagcatccatatcatgatggccagtttcatcatgtacatgtaatggttctctatctttgtctaccactaaaccaaaaactactgggttttttaatttttcaaattccttttttaacaattctgcatcttgtggggaaaataactttggcataccgtagcttaggatagccctttaaaagtgtgaaagatgttatattatgaaagaggaatggaaagtctttagaggttttctagataattatactttaaaaaatttagccaaactagaaagctctggttatttggatagcttagaatatattgttgcagagggtaaggaaagcgtagtaattaaaggaaaatacgaagacaacgatatcgctataaaaatttatagagtgatgaacataaattggaaagattttcatcgctatctaagacaggatagaaggtttaagggcattagatggagtagagtagaaataattaacgaatgggttagaagggaatattctaatcttatgagagcttacaagtatggtattaatgtgccaagaccaatattttataggggcaatgttttagcaatggaatttattggcgatcaatatccagcacctaagctaaaagatatagattttgatgaacaatctataaataaggttaaagagaacctatctaaagatttggaattgttagttaaaaaagccaaaatagtgcatggcgatttaagcccattcaatattttatactatagggaaaaaccctatataattgatgtttctcaagcaattccaatagattcgccagaagcaataaacttattaaaaagggatttttctaatataaacttctttctaaagaaatatgggctttctttggatagtactttattagatgatctaatattattcataaagagaaaaaccagtaatgatatagagctatttactaaaccaggattgccttaaatttttaaacataatatatagaatatgccaccccatcgggggcagacacccggaggtcccgggttcgaatcccggcgggggccctcctatttattgtttcttataattttcttgtgcttgttttattattttctcagcttcttcttttcctaaaaattctttaactttaacaaattttcctggttctaattctttatacctttcaaagaaatgttttattttaagctttattccctcttttaattcacttatatcctctatttccccatagattgggtctactttttttactggtacagctattatctttctgtctacccctttttcatcttctgtaactaaaactccaatgggcttaacttttatataagagccaggcactaatggttcttcagtaataactagtacatccaaaggatccccatcctcttctaaagtctctggtatgaacccataattgtatgggtaaaacattgccccatataatattctatcaacctttaatttaccatcttcatattcatactttacattgctcccttttggcacttcgataaacgcataaacctccatagttattctaaaggatatagtttaaatactgttgatggtatcactatataatggttgtggaaaaagttaaatgataacgagcatatcatataatgaaatattcaaaattcttattcacttggctagttttatcatcagcattatctctagtatggcctgctaactttccattagtatcgaagggagaaaaacttgttattggaaaaggttcaaaattagttattgcacttccgggccaaagcgagaataaaaatgagaacaaacaagaaccacaaaataccactagccaaaaacgtaataagcatttgctattagtaataaaaacccaaaagaataattttaccataaatgcgagtgatttaaaagtagacaatatatgtaaaatagaaaaactgtgggttgaaagcagtttgggtaaagaatgggatgttagattcattttcaaaaatggattaacttctaacaacatttgtatcaatgggtttaaaagcagttatacatacacaactcaatcaaaagaaataatttttgacaaacctgttactcttacaaaactttgtgtttatggagatataggtaaatatggaggagacataaaagtatatattaatggtaaatatgttggtactataaaacatgataacttttttgatgcaatttgtatacagccagtccccccaaccaatagctcaaacaaaagatatgtacctgttcccaattacgtatgtactaaatataagccagcatgtaggaaagaggttaggtggcctgttctctgggaagaaaaatttgtatgtgaatgggatccaaatgctagccaaaagttttacccaggggttaaagagttattagataaatatgaagaatgttgtgcatacaaaaatggctatattgaatgttacccatctctatgtgcaagtaataaaataagcggtttgcttaaagcaatacatagtgccaaggtttgtgtaagcaaggagcaatcaggttactacttttatgtatgggaatacggtacaaaatgtgcaaaatggggcccgtatcaatggtatgacactccccccaatgataaaaactatacttgcactcgtgagtataggtgtatagaatataaaacctactgtggaaaatgtattcgcaccattactaaacttggaacctgtactaaaccaaagtattgtactcgtcctaaatattgcactagaacaaaatattgtactaggacaaaatactgtactcgggacaaatactgtaaaaagagggtgtgtgatatgatgatgtatttcaaccccttcttctcccccccaacaataattgtacctgcatctattaaactaccgcttcctgggaagtgtattgcatctcatgaggaaaaatacaagtgtggaacgcaaagatatgcttgtggtactgagagatatccttgcggtactgaacaatatgtatgtggcattgaaaagtaccaatgtggaacggaggtatatacgtgccgtaaaaaagagaaaataatattgtataatatagaagaaagtagttgctcgggggaatgtagaaatagatatccaaaatgcgtaaagggcaaatatatgtataaatgtgaaaaatgtctacaatatgaccctgtactagtaaacagttacctaactcccccttactataagtataacgcactcgttggggattataagtgtataaataatacctatcaagatgtaaagtcaataagatttgaattaagttcaaaaatagatgaaaacgatttctgtggttatccgtttatggcacgcctacaattctatttgatttctgctaataacaataccacactgaaagtaaataacgaaacaataaaaccagaatccgtagaatctgttgatgtacaagccacaaagatagagtttgcttatcctgaaaagtttgagggatatgtcctattaaatgtgtggggagaaggtaactttactaaaaacgaatcttctgcattgaaggttagagaaaaagatggtaaaacattagttagcccattgcatgccattaaaagatttgcaagaaatgccagaaagaaaatgaaaagctttatagacaatgcccaaaagagatgtctattcccattctggcccttctgttaaattttttatacattaattttataccctaagtgctagacaatataagtgctgcgatattaagacagttagattatttatcaaaacattatgaatgggttccgtttgagcaattaaagaaaagactggactataacgaaaaaataataaagaaaaaaataaaagaattgctaagaaaagagtatatccaaggaataccgcatgctaaatataatgaatgggcctttaaaattacttctaaaggcttagacgcgatagctttccatgatttgcaaaagaacaaagtagtaaaaaaattattaaacccaataggtatgggaaaagaagcagaagtgtatttagccttagattttgacgataatcctattgttgtaaaaaagcatttatttgatagggccaaattcaaaaaaatagccaaatccttagcatatgcttctattaaatggagagcaaaacaattgggcaaaaaactatacgaaataaatgtgcccagagcaaaagctcaaatagaatcctatgttttagaaaaactatactacatgggtttccatgtgccaaagcccatatctattaataggcatattgtagtaatggaagctatattagataatggttttcctgcaaagcaattatctaagctaaaacctgacaaagaattgggtttaaagatattggaagaatatgataatatagttaaaaaagccaaaatagtgcatggcgatttaagcccattcaatattttagtaaaaggtggagaatactatttcatagattgggcccaagcggtgcctagcgattatgaagaagcaaatatattatataaaagagatattgaaaacataaaaaaattctttcatttagacgatactatgtgaataacatccctatgttttagtttgtaatcttttcctaaaatctttctagtccttacatctatagccttaacgaaatgttttgccaaatcttcatgtatcttcctagcaaaatctaatactgttgagccctcttttaataaaaagcagtccggtaaaacattgccttctttatcggttagcttatctatacccccggggaataccgctatatatttcaaaacatcgaaaaccaaagtgtctaaagcattttgtaccccagtactgccaaacctttctagtatgtttgtttttatgaaatccaatacttttttctccttttcgcttaaaggttttaatatttcaaaatcactttcgccaggtatataggatattttaccttgtttgtccaattcttttaatatatactctgcatatcccgatgtaggtattgttaatggatattccttttttattctttctatgtttttttctgccaaatctggatctatgtctattctgtttgcagcaattacaaaaggttttgagtatattcttaaaagatgtgctaatttaaataacaattcgtcatcgaaatcataaaattcactatctaaatttagatctctaaaagctttctttacatggtctatatttacatttaacccagacattatctttgctatttctctatctattggtctcttctctattttagcaactcttaagattttatctatattcctttttaaaacattgtaaaaccaataatctaattcttcttctaaccattttatgtcttttaatggatcatatttaccagggcctacgaaatggccttcctcatccgtggcaccaacagcatcgacaaccattattataccatcagcttttcttatgtcatctaaaaattggtttcccagccctttaccttcgtgtgccccaggaactaggccggcaatgtctataacttctattggtacaaatctatatttgcccttaataaaaccatgccttgggttagaaataactccaaattctgggcctacatcttcaactctaacatatgcaactcctttgtttggttctatagtcacaaaaggcctattatctatttctactggttgcaaagtcaaagctttgaaaaaagtagatttgcctacattgggtttgcctactatgcctactaaaaccataacacaatttttattaactatttatagctatgccaaatgaaaatagaagtaagagctgtagggggttataacgaaataggcgctaatatgacagctattggaatagatgacgaatggctaataatagatatgggtgtgcatgtcgataaaatgttagcatttcaaaaagaccaagaagaagttgtagaatggaatagggaattattagaaaaaataaacgctttaccaaaaatagagtatatagaggatataaaagataaagttaaggcaatactaattacgcatggccatttagaccatataggagcagtaatacatttggcttatgaatttaatgctccaattatcggcccaccctatgccatagaattaataagatctttcgaaaaggattataaaataatattgccaaacgaaatgaaaaagataaaccttaattcctctatacaaattagcgataaaataagtgtagatttcatttacgcaacccattccataccgcatagcgcccatttggctatacatactccaaaaggagtaatattcttctcgggagattataaattcgacaatttcccagtaatagggcaaaggtataatttagaaaaactgaaagagatagctaaagaaggggtaatattagcatttattgaatccactagggcagacgaagataaaagaagctatagcgagataattgctagggaaatgcttagagatgttttattcgaagagcatgaagggttaataataatgactactttttctagccacatagcgagattaaaatccatggttgaactaagcttagaattggatagagatgtgtatatattaggaagaagtatggtaaaaaatgttgaaatcgctgaaaaacttggaatatacaagtttagcgataaggctaaaatatatcaataccatgaccaaatcgctaggctattaaaaaagattgatgatagatctaaatatgcactaattgttacaggcaaccaaggagagcccggtagcgttctatggaggatggcttttgagaaattcccatttaggttagacaaaaaagatactgttatatttagttgctttacaataccaaatgctataaatattgcttttagaaacctaatagaggaaaaaataaaatcttttggtactagaataataaaagatgtccatgtctctggccatgcaatgagggacgaccattatagactaataaagatactaaagccccaaataataatcccaaaccatggagattttataaaaagaggagcattagcagatttggcgatgaacgaatttggttattctttagggaaagatttatttttaatacaaaatgggcaaagaataaattttgagttctaatttatttcttctttattaccccaacagttctgccttttctatggtggcttctagtcctttgccctctaacagggagaccttctctatgtctataacctctccaagagttgatttgcatttcccttttaatatcgaattccattgtaattttgtaatcgtttcctaccaaatgtaagtcttttccagtttctgggtctctccttctattatataaccaagaaggtatcccatatttccatgggtttcttaatgcgtcttccaatttttctaactcttcatcactcaaagaaccaatttttctccatttgtcaattcctaaagctgcacaaacagcatgggcaaacatccaatttactccaacaactttccttagctctacatatataggtttgtgtccatctaaatccacatccgctatatggactatatctttagttacctctccatagggttttttggccattcataaaatgctaaacaaaaatttaataatattaggggtataaccaactctttaaagattttataacatcttttgctttattctcaaatcctgaagacaaaacatctaaatcgtataatgagtatacttcgctaacatttcctgcagttccattggtgtcatcttcacattgctcaaaacttttgtcattcattatcaaagatatcgtgggctctgctattttatatctaaatggatatgcatagataatatccaatttcgcttttttacctaaaactatgtctgtaccttcaatatcattatcgttacattgtaatttagtattgttagcagttaaactacattccaaagcctcattaaatggacccgaatcttttatataagtataactcttaatggtgtatgtattgtttttatcatcatgtgttccatctgatatcgttacgttacaacattttgtgatgtcttgcccatttaataatactttcacaacaagggcgtcttttagatcattaccatcttttattggaataacattgttgtttttgttaaacttaattataattttgtaatcattgtatatcgattctattttcacatttgtattaacatcagaaggtaaagagaatttttttgatacatctccaacattgcaattacccatcggggaatctttgtgtttagcaactctcgtacatacttcatattcttctatgcctcctattactccaaccaaatatatcggaatagttaattcaggtgtttgtaaataagaagtatctatttggaacatcacataatatggcacagtgtttttctcttttaaaccaacatatactgctttgctaatatctttcttaaaagtaaacttattcatatagtaagtggtgcttccactggttgctgtgtttgttactcccttttcagatttcaaagccctactacataaaacattatccacaaaaagataaacactgtcattagttaaattaataggcaaatggttatttattctcataggaatgggtattttttgtcctaggttaaccatataactattttttccttcataagttatagaaactgcgttaccagaactataatatgtttgttcctccgtagtattatttattggttctacttggggttggttgcttagatttacgcaaccagaaagcataaataatatgcctaatagtaatagataatacatatttatttttcgcaatcttatttaaatatatagcgcccgggcccggattcgaaccggggacctgccggttaacagccggccgctctaccgggctgagctacccgggcagagagtaatgtaataacattttaaaaacattattacctttaaatgcaatagaaattaacttggatggcttacccctaccaagggagagacaatagactaattactgggagaatccatcctagggctagaaaaaagagaaaatatgaattgggtagagaacccacatttactagggtaggagaaaggaaaattaagaaaattagggttagagggggaaatataaagataagattgaaaagagatatgtatgttaatgtgtatgaccctacccaaggaaaaacagtaaaagcaaaaatagttagatttttagataacccctcaaatagaaattttgcgagaatgggtatactaactaaaggggctatagtcgaaacagaattgggcaaagtcaaaataacttctcgtccaggccaagatggtgtattaaatggtgttttgattcaataaacacaccaaatctccaaaaattgatgaacctaagctaaggaaaattattccagtaaaggttttcccttcgtataatgatacaaaccctttatagaataaaactatagacaaagccaaaatcgctattgcaaatacctttctaaccataaaacaattattcccaaaacaatataaaagcttaacttttttattgatgttcttttattcctaaatagcaaagctgtattgtatagcaaaaagattgctaaaaaagtttcatagataggatataacatatcgcaaaatatttcgcaaggtaatggccttttaattaaaactaggaataaataaaaaaccattaaataaaacaaaaatgcactatttaaatggattcttgtaaagtttatgttttttagaatggctaagaaaagcatattattataagccagtataaggtaatcaaatacaaaagccaaacctatagcgtaagggcttatcttatatactaaataagcggttatgagataatatattattctaagaaagaccagctttttctcgaacattgttgattatgggagataatgctaaggtaaaaactatatatgctaaaaacaaagatattgttcctcctatgaatggcaattcaattttgaaattttcccacacattgccctttaataagcctaacaaagataaaccaattataaacaaagccatatttgcgaacatatattttttcattatttcttgttttttgttgtaaatctctatgattttgtcttgtttaactaatgctaaaaatgggtttttttgtatctctttcaattcttggtttattttttttatttcctccgtatcaattaagattgctcccaataataaggataaaccgttgagcaataatacagcaccaatagctattaaaagcaaaccccaattaacattgcctcctaagaaatagtttactaaaatataagcaatcaaaaatagtatgaaactatattgtttcattttgattttcctttagctcatttaagaatttttctttattctctatccatttatctatatcgattagtgtaacagtttttgccacatttattgataaattatttcctataataaattgttcccctcccaattcatgtatatgcccatgtatatgcaatagcaattctttgttttcaagtatgtcccttaatcttacagaacctggtataaaatctataccatcaggatgttcatgcgttactaatatagtattagaatcgattaatggctctatttcattatattcatcttcactaataaaatatggtcctaccgttgcgaatcccatgcctactaaattaaatttgccaaagtctatcctttttttatgaatagaatggacattactgtattgttctgtcaatctttctataaactctggaggatcgttgttgcctggtataatataaaagtccttatcgatttcaaataaattcaaatcaaaatttccaccataatcaaccaaatccccagcgataacaatcatatctgcattttctgcttcttttttgatttctttctcaagggttttgctattatgtatgtcagatgtaaataatattttcatccaaattaaggattaagcaaaataaaaacgggcagccacggggaaccccgcatgctaggccgctacaccacggggctagaggtttagtaagtgtacatttaaaaatttttaccgtatagccatttctcagtagttttatttgtgaataaaacgaaataagcaacctataattaatattattaaataaggaggtttaaaaatttatggtgatggacgatatcctaaaagaggcactagaaacaatgaaagacataaatctatcaaaagcgagagcagcaaacataaaagttgtaggtgtgggcggtgcaggatgcaatataatagaatggctatacaaaaagaagatagagaatgttgatctaatagcaatgaatactgatgcagtgcatttaaaaagtatgaaggttgatcctgaaagagtaaaaagaatacttttaggaccagatattacaaagggccatggtgctggtggtaaaccagaagtcgccgaacaagccgctagagagagtgccaaagagataaagcaattattagaaggggcagacttagtttgggtagttgctggcatgggaggaggtacaggcacaggagcagccccagtagtagcagaaatagcccaaaatgttggagctttagtaacaagtttcgctataaccccatttagatttgaagggagaagattacaaatagcttgggaagggattagaaggttaacagaatttagtaataccacagttatattagataacaataagctattcgaagtagcaagaggtttaaatgtgcaacaagcttttgctttgtctaatgaattggtagcacaaacagtaagtggggtagtagagatagtaactggggccgcagatataaatagagatttagcagacataaaagctattatggaagaaggacatgtcgctgctattggtattggagaatcctctagtgagaatagactaatagaagcagtaactagggccataaaacatccattgttagatgtagatgttaagggcgccaaaggtgctttaatctatataacagcagggccagattttaaaatagatgaactaaaatcgttggaaacatttgttaaaaataatttagacagtaacgcctatgttagctggggtttaaaaataagagaagacttcggcgaaaaagtaagagtaatagcaatagttactggagtaaaaagcccctatataattggtaaagactttatatcaagaaaaaaagatgagtatggaatagataaaattttgtaaaaccagtttagcataattttcgagaattttgtttgattaaaacaaaacattgttgaaatatatttaaagaaaagctctattgttgtgtatgtccgaagaaggaattaaactaaaagtagcagaagcgtaccaagaagatgtatatttaggaaaagtaagagtagactacgatgttctagatagattaggattgtcccccggcgatataatagaaatagaaggaaccagaaaaacctatgctattgctgatgttttatatccagaagaccaaggattaggtataataaggatggatggtgtaataagaaaaaatgctggtgtaggtgtaggagaatatgtaatagttagaaaaccaccaaaaccccaaatagcgaaaaaagtagtattagccccagtaaaaaaggaagaacaaataatcattgacgaatactatttaaggaatttactaaatggcttcgtagtaactaaaggagactatgtagtagttaggtttgataatttaggcttcttcatcgattttctaccattaaaagagatgtggttcaaagtagtttctactaacccaccaaaaggcccagtaataataggaagagatacaataattgaaattaaaccaggaggagtacaagaaataccagaagtaacttacgaagatattgggggaatgaaagatgttatacaaaaggttagggaattagttgaattacccttaagacatccagagatatttgaaaggttaggcatagaacctccaaagggagttctattatacgggcctccaggtacaggtaaaacattattagctaaagcagtagctaacgagagtggagcatatttcattagcataaatgggcctgaaatagtaagtaaatatgttggagagagcgaagcaaaattaagagaaatattcgaggaagcacaaaagaatgcccctgccattatatttatagatgaaatagacgctattgctccaaaaagagatgaagctgttggtgaagtagaaagaaggctagtagcgcaattgttaactctaatggacggtcttaaatctagagggaaagtaattgttatcgctgctacaaatagacctaatgctttagaccccgctttaagaaggcccggtagattcgatagagaaatagaagtacctgtcccaaatgaagaagctaggtatgaaatattgaaagtacatactagaagagtcccattgggtaaaagagtagtagaaaaagtagatggcaaaacagttgaaaagtatgtgccattaactaaagaggagaaagaacaattgttaagaaaattagcagcaatgacgcatggtttcgttggggctgatttggcagccctagttaaagaagcagctatgaacgctattagaagagtaataccagacatattagctttaaaagaagagaaattgcctaaagaattattagaaaaattaatggttactgaagaagacttcaaagaagcattaaagatggttaccccttctgcgatgagagaattctatatagaaataccaaaggttaaatgggaagatattggtggtttagaagaagttaaacaagaactaagagaaactgtcgaatggcccttgaaatatagaatagaagaattgggtatcaaacctccaaaaggtgttctattatatggtcctcctggaactggtaaaacattgttagctaaagctgctgctagtgaaagtggggctaactttattgcagtcaaaggaccagagatattgaataaatgggttggtgaaagcgaaagagccataagagagatatttagaaaggctaaacaagctgctcccgctattatatttatagatgaaattgatgccattgccccagcaaggggtagcgatgttaatagagtaaccgataggatagtaaaccaattattaacagaaatggatggcattaccgataggggagatgttattgtaattggcgcaactaatagaccagatatattagatccagcattgctaagacctggtaggtttgatagggttatatatgtaccaccaccagacaaaaaagctagagtagagatattcaaaatacatgctaggaaaatacctaaagaccctgagctaaaagaaagatttgaagagttcaagaaaaacttagagaaactaaaggaaataaaacccgatatagatatagaaaaatacaagaacttgtcattagaggaagcgttagaattatataagaaatccaaggaatttagagatatagtagatacagtattgttctatataccattggcagaaaaaactgaaggatatactggagcagacatagaagcagtagtaagagaggctgtaatgttagcattaagagaattgttcgaacaagctaaaaaagaaaaatgggatgacaagaaaataaatgaaatgattggaaaactaaaagttaaaatgaaacatttcgaaaaagccttagaaaaagttggaccaagcgtagataaagaaactataagagcatacgaagagtttgccaaaaactttaggaaaagaataaacaaaaagaacaacccctacttaggataaattttttcttttagtttattgtatatttctactaacacggctttttcattgtcctttaacattttgtattcatcttctacttgcttctcgtagtattttttataaaattcatttaatactggaatttttatttcagggtctttctttttagtataattttttattgtaacagaaatatcgcccttagtatcataaccatcaactctaatttgtatatagaaagcactatatagtttggcatttcctacgctatctctattgccttttgttagaatactaattctataatatcttttgccttgaaagaccatttctttatattcaacaaatgggatagccaatataggtttttgttctaccattgatttgcccaaagcgtttttcactatatctatcaaatcttttatctctattgcgccagaaaaattcaaagtatactcataattcttttcccagctctctaatttgtttaatatctcttctattaatttagagggagacaatttgttttgctatttcttttagctcgtgcaacttagattcatattcggcaaactttttataaaatacttctatatactttttaagttttgttattttttcattggcgttgcttagggaatataatatagcatctatttcgcttaaggattggacaacaaatatgcctttagtttttagtatgtttggctctgctttaacctctttggcatggaatatctttatatttgggcttattcctaataattctaattttcctaaaaaggttgcaattttttcattatccaatatatcgctatataatactacatatactggtacacccatcactattttcttacctatagttaagccatctttctttattattgtatatccatgctttgttaatataccttcgatatcgtttttaggttctacttttggttcttctttcttttgttccaaatctatgttaaaattaatctttttccttaccccaataggaattatttcatttaacctatctaattcaaattccttatctaatgcccttagtttaatgggtataaccaaaaaatagtctccttcaggcatcttatttaagtatatgtcagaaattgtattctctattatagttacatgcccttcatatttgttgctcttttcatcaaatacatatactgctatatccgctaccaatggttcgtcattaaataactcttttagcaaatctccaagttttttaccttttacttttacattatctagtattgcttgcaatagttggtctttgtttgatggggttatataaaaggaatcctcaacttggcctttctctttggccctaattaagaacatgatagaaattgcttaaacatttaataagtgttttttatttactaatcaatagataatcttcttttggtattatttttatatggccttttcctatccctactatttttattggggttttcccttggtaatagaaatttccacaatatactaacaaactattagttttaccatgtatggtgcaatctcctaaatcagtttctatagctttaccagttttattaacatataaagccaaagcgtttattcgataaaaattagcaatagccaaatttttttgaacatcattagatatagtttttagcacattaattagatggtaaacaacattgatagcagtagccccaactagggcgtaaaagactaatgtaaatatactgctacgcctcaaaattttctgggactggaattatattgtctaaccatgtctctcctacttcgcctgcaacttctaatcgtactatgtttggccagggcatgtctgtttttattacttcttttattactccaatcctaccagtgtgctttcctcttattatataagcttttctgtccttttccaatggaattacttctctaattttgaaattcggaatttcatatactacaccatagtgagttttatatgaattatctcctaaaaatgttctaccatctgttaaagtgtattgtatttttcctcccctaacactaacttttcttattattttgccatattttatgtttgcttcctctttatctatttttttcaaataaagttttcccctttcatctagcaaaactctataatactcgttaatttcagggatagctagtacatcaaacaatcctactgggaatttataatcctttattggtctcccatctactaatactttgccattgtttaacaaatatctaacttctctcatgttttctgccaatcctaaataatctctaagccaaacagcgataggcattgcaaactctttagaatggggaccaggagatggtttaacgatccaataacccctactctttctagggactggccaagttcttggtacagctaagcttcttagatgtctcttaatataggtgggcatttaggaaaatttgttatcctatttataaatttaggttttccataataatctcgaacccgcttacggggaaaacgataccatatttttctaacacattggggtctatttctccagcataggccttaaatttatcattaacaaattctgctgttctaccttctaaaaagtatttatgtttcccttcttttatttcgtaattaatacctaactcttttaataggaaagctaattttgatgctgctttattgtaatcactatcctctgaaagagacaaatatactatactccaatatggtttttctctatatattctaccaaattcaaatatttctataggggctttatattgattgtttgccaaaaactttaataatgggtgtattaagctgtctcttagataggaataattagaactaactggattctttattgggattattcctttgtctgttaaagcaatggtataaacttctgtggctcctaagcccaacaataattttcttatatcattatataattgtattgttttattgaattgcccatgtgatttgtattcttggtaaggcaaataatcgtatcctttaattatcatataatcctcagctatgtctgtgaaatcatatatatcaaacctataggttaaccaactaactttattaccgtctatgtcatatcttgcttttcttaatagttcgggttcaacttttatacctaaccaatcttcaatgtctttccaatttacttccattgttcttttttctattttatatactttctcttcgttgttttttattattttaactgtttcagcatactcagctatttctaataggttagcaactattgcgtttaacgttctatgaactcttctttcatctatacctgtcacatctataaacaaatcggttgtatcttctctaattctaccaactgtattagaatttattattggggggaaactcaatattttcccttcgctatccattaatacttcataatatttaactaaatgtttatattttttgcctttttccgtttcaagtatttcctttaaagttagctctttgttatagcctaatggaacaaactttgtattgggatctacttctttataatacaaggggaattttatcattttgaaattatgtatcccaatcgcaacatattttctatctctcccatagttttttgctaaggtttcttgcatttgtattatgtatttcaatgtttctttatccattgatacatttcttactactgcggctgcgacatatggtctattcctagaataattgtataaaacataatttccttcttttatcttatagtctggcaagccctcttctattccttttattccttttagctctcttgctatcccaaaaacgctccataagtctattctttctgtgtctttgacttcgattttccagatatttccatcaatgctgtctaattctgctttgatttttggcaaatcctctatttctaaatctaaatcaaatttgtccttaagatatttggtgtctatagaaataatgggcatatatttcggtatcgatattatttataaacacactattgatattttcaacaatggctaaggaattcagatacaagggatatactttacaagaattagagcaaatgtctttagaggaattagctaaaataatgcctgcaaggcaaaggagaaccttattgagaaggctaaagtttggatggagtgaccaacaaaagaagctattcaagaaaatattgttagcaaaagaaggtaaatacaaaaaaccaataaaaacccacgctagaaacacaataatattgccatttatggttggtgttacagtacatgtctacaatggaaaagaatatgtcccagttcaaataaaaccagagatgataggccattatttaggggaattcagctttactactaagagacccaagcacagcgccccaggtataggtgcaacaaggtctagcgcgcacgtatctaagaagtaaaattttttaaataatatttttatccaactctgggcccgtagctcagcttggtagagcggcggcctcctaagccgtaggtcgcgggttcgaatcccgccgggcccggaatatttttaaactcttatataaatatacgctgccccgcttgccatggtcggcatgacaaaaaatgaatgccgatcctccggcggggctacatttgtttcgctaataaataagtttccaaatattttttcatcttttccgcgatctctttatcgattttttctatttcttctatagagatttcttcaggggatttaaactctattatatctggtatctcggcatctggttttagtattgtaacatgtatgcctgctacaccaggtttcaaatatgctatgttaaatgccctatccaattcgaattggcctattgttccggtttttcttagattgccggctttgaaacgccatgttttccctctttgtccggatagcctaccagcaattactatctctgctcctatagcaccagcattcattattgtttctaaatatctttgtgctaaccttctataggctcttatgtttctttctatacccatggctaacctttcagcaatgacatgtgcatctaaattgggattttctatgggtaatacttctattactggtttttctaacccgaatttcaattctaatagtttagccaaatgggcttttctctcttcactaatcatctttggtctggcagaataaattattactctattaactataggggtttgtcttattattactttagatacattagcgccccttaagtatagcctaataaattcctggctaaatactgtaagttttgcattttggatgaatttcctaataactttggatgccatttgtaaagctttttgcaatattttataaattcacacctgttattaccactatctcttaataaacatttttaaataatagatatattttttacctgtgccaacttctaaacagattataaataaaaagcaagatgaggttagtgacatttatggaaaggaaatgattagagtaattagatccctgttaaagcataagattattgatacagaaagtctatccaaaaaaacaggttatagcataaacacagtaaggagagcattgtatacattacaaaaaatgggtatagttcgttacataaataaagaagacaaaaccctatggcaattgttagaaaccgattatgagaaaatactagatactctgttagagccatacaaaaaagaagaaaaagccgaaacaggagaattattatttatatgtccaaagtgcggtaggaaatatacattagacgaagcagagatgtacgaatttagatgtcctgaagacggaactcttttggttgcgaaccaatgaacaaaattcttgctgctttaagctatttaaatatttttctttggataattatttattctttgtttaaggacgacccttatattaatagccatttaaaatacgcattaatagtaaacctgataggaataatacaatttctattaggaataagcggtttatattttgtttcttaccccttattgatattttatctaattattttaatttatggaatagttaatgctttgttaggaaatgatagcccggaatatttgcaaaaattgtatgagccattttctaattatttggatcaatatttttaactaaaaggttgttaataaataaatataaataaaaagggagaaacgaattaaatgagcttcaacctaaatattccatttggtaaaaaaagaaaagaagaagaaaatttaatgtcaatgaaagatgatatatttgcagagcacaatatgccagtgcaaccaccacaacccccacagcagccaatgccaatgcaacaattgccccaaccacaaatggaagaaaatttagatgaaaaaattaatgaattaatagagaaatacttagaagaaaagtgggaagttgtttcgcaattcttacaagatttaaaggcatggaaattaagtgtggacaaagaaattaaatctctaaaagaagaagtagaaaaattaaaagccagggttgatgaaatagagaatggttctcaacaaaagttaaatgaagtagcaagaagtataatggatctaagcgcagatataaaggcgatggaaagagtattacaacaaatgttgccagacttggttagctctgttagagagttaagcaaaatagtttcagaactaaaaagtataaaaaatagccaactatagaaaatatctaaaatcgtattggcttttgtttattggttctttccatatatctcttttcctagcaaatagctctcttaattggggttctttctctttatagaattctagcaattcattgattgtttgttttaaataatctatatctttaaaatataagccatactttattgctcttgaataataggaagcaagcctgtatagttctaataaccattcaatgtctttattgctaaaagcccttagctcatgtattaccgatatctcttctgaaggcaataaaattgtttctatttcatctattattatgtctattttgctattggccctcctagctaatgttaaaaccaaaattttttcgtcttcttttgctaattctatttcgtccgcatccaaatagcgaactgctatttcccagttttttaaatatttttcataaatctctttcgttagcttcattaggctttagaaataaataaggttaaaaataatatgtaccctattaatagaattaatccatctatcttagttagttttcttttaacatatgctgagagagtcaaataagtagtgagcaacaatagcaaaaatagatggtttataactattatgttagcatgtatgggattaattattgtggcgatcggtaaaattactcccatattaaatatattacttcctaacacatcgcccaaggcaatatttatttttctttttagagaagatattatacttacagttatttcaggcaaagatgtgcctatagcaattaccagagagcttactaaataaggcattagatttagattttttgccaatactattgtgctatttattaaaattttagcgcttattattactaatgctaaagagccaacaaaataagccaaatctttccaatgtaatttttgcttttcttttgattttattccatctttgtatatgtttaacaacataagagcaaagaaaatcaatattgttaatgcttcatatttgtccaaaacactatcatttagtattagtaataatgtagctaaggttattgctccatgtatggggacttcgttaaatagagtttccttttttataactaatggactaattattaaaccgatccctaaacctaatcctaggttagcaaaattacttccaataatgtctcctaaaactatttcagatttgttatctaaagctgctaatattgctacagccaattctggtaatgatgtggatatactaactaaaattaaccccaataatctatcatctatgcctagagatttacttattctctctccgctttctaaaaatttgtctgctccaaataagagaaaaaataaagaaactaaaattaaaaaactattgaacagcgtagagacgagcaatttctattgaatatttccaatcttttggcaaaaccccttttcttttatagtatttggccaatctatgtattttggaaataattaattggtaatttcttttcgcttgtgtgtctctggggtttaactctatatgtttatacactctataagccctttttaataaataaatcaaatcccatggtatatctggcaataaacctttttcctctaaaaagtcttgtaagctttttcctatataaagcctaacatctgggataccatattggtctcttaatattaaccctatcattgctggagaatacccttgttttgccaactctattattttgttttcaacgaattctttatcatatggggcccattcgggctttgtagttcttaatggcctcttactaccggattgcccatgatatcttttatgggcatgcaatctcgacattgctgagagaaaagagataggctttataaatctatattagaattttagtattgggcaattttttgtccttagcttgttcaacaaaattttctaaatatatagctttgtcttttaatttttctaatgcagtttggctaaaggataatgctacgacttttacatcttttgttaactctccagagcctaaaaccttgcctggcactattatagtatctccatcattagaatgtttctctattttccataaattaacaacaaaatgttttttccttctttttggttttgataacaattccgctatatatttaaatatgggtctttttgttttttctaattgcctaattagttttcttacattaacatcggtagggcctgttggtttaaccatgggagaaacaatgataatatatttaaaaaatatggttgcaatctctaatggctctcgtatgtgtaagttgtaaaactagaatatccaatatggtaggcgtagcaatattcaaatgcccaaaatgtggggctacaattgttagatgcccatcttgtagggccaagggtaacaaatgggtttgtcccaaatgtggttttgaagggccataaaattgtgtaaacatttttaaagggtataaaatattactcgcaaggcacccgcggtaagctcgccgggatgattaatgattcccggtatccaaccgcgggtacaggagtgcggcagagaccttcgggtctctgccaagggaagagcccggcacagggagaccgcatttttctttgcggccgtgctccctgggtccccgagtgggataagggcccagggaggcggggttttattcccccgcaactcccgttgatcctgcgggaggccaccgctatctccgtccggctaacccatggaaggcgagggtccccgggtaagggggcccgccgcacggctgagtaacacgtcggtaacctaccctcgggacggggataaccccgggaaactggggctaatccccgataggggatgggtgctggaaggccccatccccgagaggggctagcggtacttcccccgctagcccgcccgaggatgggccggcggcccatcaggtagttggcggggtaatggcccgccaagccgaagacgggtaggggccgtgagagcgggagcccccagatcggcactgagacaagggccgaggccctacggggcgcaccaggggcgaaacctccgcaatgcgggaaaccgtgacggggggacggagagtgccggagggcgttatgctctccggcttttggggagtgtaagtagctccccgaataagcggtgggcaagaggggtggcagccgccgcgggaacacccccaccgcgagcggtggccgtgattattgggcctaaaggggccgtagccgggccggtgtggctccggtgaaatcctcgggctcaacccgagggcgcgccggagctactaccggcctagggaccgggaggggccgaccgtactcccgggggagcggtgaaatgctgtaatcccgggaggacgacccgtggcgaaagcggtcggccagaacgggtccgacggtgagggccgaaggccgggggctagaacgggattagagaccccggtattcccggctgtcaacgctgcgggctacctgctgggcgggctacgagcccgcccagtggggtagggaagccgttaagcccgccgcctggggagtacggccgcaaggctgaaacttaaaggaataggcgggggagcacacaagaggtggggtgcgcggtttaattggattcgacgccgggaacctcaccggggctgacagcacaatgatggtcggcctgaagggcctaccggaggcgctgagaggaggtgcatggccgccgtcagcctgtgccgtgaggtgccctgttaagtcaggaaacaggcgagacccgcgcccgcagttgcgacggccgaaaggccggcacactgcggggactgccggggaaacccggaggaaggtgcgggcgacggcaggtatgcatgccccgaatgccccgggctacacgcgcgcatcaatgggcgggacagggggccgcgaccccgaaagggggagcaaatccccaaacccgctctcagtccagatcgagggctgcaactcgccctcgtgacggcggaatctctagtagtcggacgtcaccagcgtccggcgaatacgtccctgctccttgcactcaccgcccgtcaagccacccgagctggggcctagcgaggccgtggggggttcgccccccacggtcgagctaggccccggcgaggggggctaagtcgacacaaggtagccgtaggggaacctgcggctggatcacctcctagtaaagcggtctccctgtgccgggctcccaaatgtgatactaaacaaattcgtttatgacatactctctttatttctattctcgttaggattagccctaattggcacaattatttcttctataaaaacccaaactaagcaatatttagatcaatatttatccctatggtgtgcgagtggcaaaatctataaaagccaatacaaaactttctcccaatatttgccaaaagatcattatttgtattgtaaaaaagagggaacaataaaactctatatcgcaaaaggtagtaatacttttctatcaaagaaatgtgatttgttaaaaatagagattataaaggataaaagtagaagcgaagttacatgcgatagtgagatcaatattagcaagtatttccaataaattattaattttttaggaaaaataagttttaatggtagaaaggatagtcctaacattcatagctataattgggagcatacagattttgaaagaacatttaaatttaatctatacctctgcaatcgcttattctctaattcctattctaattgtatcctatacattatcaaaagaagtatattctttgcatgaagcactttataagaagcacaaattattgggatttttggcccagtggttctctattctattgcttagctctttggccgcagcagcgattaaagatcatcatgcatggataataatattgctattctcactaatctatttgatagatgaaagtatctttttagaattcttagcattgctaggcataatatcttttttaattccaggtttagaacaaactccctttatagttataacagagccaacaatcattatttttagtatatatgtaacattgaaaactctacttaactgggatgtttcttatattatgaggacaacaaaatttttaccaatactattggttttaggtataatagttggatctataaccaaaggcatatcgtatttaacattaattgtgtctgctttgatttggctatacacaagcgcaaaaattttttataataacaaaatcgcctttctcgcaattattggtttagcttttttcttatctctgttagatacgcataccatattagtaacaactagcatagcaatatatgtaatgctaataatatatttcttattcaaaagcaaacttcaaaaattggttggcctatttttagcattaataattgggtatgttgcccttcgatataatataatacaacaagcgtttttacctttggtaacctacactttattgggtttaatagtctatgcaatattaaacataaaagataaagcaattgtaagctttttacataacgcgtttttctttttaattgcccttagcgaaccattatggaaagatccttcgtatctatactatataagagataaaagaagagtattagaagtaggttttggtacaggctatattaccaaacatttaaacaaaaaccatgaagtcgatggtagtgagataagtattatagaattgtttttcgctaaacttagatttttattttcaaagaaaaaaccttatctattcttagatgaaaaagataggattagtattaacaaaaaatacgatgctattgtggggtatggagtaataggatatataaaagatataaaaacttttgctagagatattgttaatcatttaaatgaaaatggcaaaattttatttgttgatttctcaaaagaagatttggatagactatcaaaagagctagaaaagcttggcgtaaaaactcaaatagaaataaaaaacaaaaaactatggcgagaatatatcttaaagggtataaaggtgttataaattattacaaatgttccgtataagtaggacaagctttaagccattagacaaacaatgggacgttataataattggaggggggccagcaggggttgtggctggtttatatagcgctaggtatggacttaaaacattactaatatcgccagataaaggaggaatgttaacagaagcatcttttatagagaattaccccgggttcatatcgatttctggtccagatttagcggaaaggctattcgagcaatatgaaaaaaatgggggacattatttaaaagacaaagtaagtgatattaaaaaggataaaaactttattgtaattaccgaaggtggttacgaattggaagcgaaagcaattatattagcaacaggctccaggagaaggaaattaaatgtgaaaggggaaaacctaccaggggtatcctattgcgctgaatgtgatgctccattatttaaagggaaaactgttgccgtcgttgggggtggtaacacagctttccatgacgctttagttttatctaattatgcaaataaagtttatctaattcatagaagagaccaatttagggcagaaagttacttagttgaaaatgcaaagaaaaaagataacatagagtttatattaaatagtgtagtaaaagaaataagaggacaaaacaaagttgaatccattatagtgcaagataaagaaggcaatacaaaagagctaaaagtagatggggtttttgttgctattggtatggaaacaaacatagaattagctaaaaaattaggagtacaactagacgagagaggaaaaataatagtcgatagatgtcaaagaactaatatacaatatgtatatgctgcaggtaacattactaacaattgttgcgatttagatcaaatagttacatctatggcacaaggcgcaattgctgctaaatccgcttatgaagatttgctaaaatagccggggcagtgggatcgaaaaccccgtatgctagacctggctacaccacgggggctagagtaaaattagagagcatttaaaaattttattggttaacaatagttacattatttccgtcgtagtatatataagcgcatgaactgccataacatagttttattgctggatatgtattagttccatcggtgtattctgttacatatatataaccattcccatcagaagtggctttgactgttatttctttattgaaagttgttttttcattgaatacagcattaccatttacagtaacactatttagagttgcactattagatacagacaaatcttttgttgttactgtattattaaccgccaaattattagctgtaacatccccatttatttgagcattgccgtttacatttaaactattggcagttagagagttataaacatacattgggacatagaatgctgcattagtactggataggctccaataatcgctagagctagaaagctttatataattatatgttatatataaattataagtcccatcgtacaattttataccttgggtagcacttattagtatttgttttgttccgtcaatccattttgctaaagcagttttgaaattagcttcattatttacaaaccaaagttctgtccattttgtataaggacaataaacggacggttgtgaagtatatggcccattgcatgttgctgccaacgctggcactattggtaaggcaaacaaaattaatcctacttttgttctcatacaacttattgtttgtcataatttaattatttgtgtaactatcaaaaagttaaatccaaatcctccaataaggtctgggttttggttcataatatattccttggctataccaataataccctaaataagcaatcattgctccgttgtctgttaaatattggcaaggcaatctatagaatttaaaattattttctttagccatttgttctgccatatcgtttagtctattgttgcatgcaacccctccagttagtattaattcttttttatctaacatatgcatggctctttctgctatttctaatattaaagcaaatacccactcttgtaaagagtatgctatgtcctctttgctatattgatctttaattctttttatgtatgtataaattcctcccaattgtaagttcaaaccttttattgtataaggcaattcgattaaatttttacctttttttgccaattcctctatttttggtcctcctgggaattctaatcctagatctctagcgactttgtctattaaattgcctacccccatatctaaagtttctccaaccaaaaaccaactgttatttactattgctaaaaattgggtattcgctcctgatacatatacaaacaatgggtctttcgctttagctaaatatctagcaaattcattatgtgctactatatggtttaccccaattactggtttatttaatttttttcctaaatatactgctatgtaattgcctaattttaatgtaggtaataaaccaggcccagaggaaacagctattaagtctatgtcttttaaactaatgttggctttttctaatgcttttaataatactttgtcaaactcttttaaatgtaattctgctgcttctctaggatgtataccatagcccttgtaagttaccttttcattggctaaaacacctttttcactatcaaatatcccaaccccaaatgtgtgggcagtacattctattcccaatactttcatagtaatggtatagggtaatctataatgctttttctagcattcccctttattggcaatttgtaaccacaatattcacatctattatctttagttaaatgtatttcatatactttgaaaccgaacctttttattactggtttaccgcatttggggcaataggtattctctagcttatgccctgggacatttccaatataaacatattttatcccttcctcttttgccacttctgcatgtttctctaaaattttaacatctgtggggggtaagtccttcattttatacatcgggtggaatcggaggaaatgtatgttggaatcttctcccataacatcgtaaataaattttgctagctttctagcatcgtcaatattatcaccaacttttggcactatcaaatcggttatttctaagtgtattccttttttatagaattcctctatagcatgcaatactggttcataatctgggattaatatgtattttctggcaaaatcgttattggcatttcctttaatgtctattgttatcgcatctaaaaattttgctgcgtactctattgcttcgtctgttaaataaccattagatacccatgttatttttactccatgttttttggctatttttgcaaaatcataagcatactctgcatatattgatggttcattgtaagtaaaagtaactataggttctgcattcaatttttgagaatagtttagcacaatatctaataactcttctggtgatatgtaagtgccaactatttgtcttctttgagaaatgtcatagtttatacaatatttacatgcccaagaacagcctgttgtgcccaaagaaaaagcaacatttccagggtaaaaatgatataggggttttttctctatagggtctatattgaatgcaacaaaccgtccatagtttaatacatatatagtgttgttgatgttttttcttaccccacaaaaacctactgctccttcgaatagtttacattttctagcgcaagccaaacatgtattgcctttcgctaaatctgctttcctcatatgaattattgatcttcgtctttattatcttcaacctctaaataatataaatcatggtggggtgcatccgctaacattgctatatcgttgggcctattcttataatgggccataatatatattccaacaaattgccttaacttctcttcttggtttagaatgaaatctcttttgtccggtttaactaattttggatttgtggggttttctattttggccggctcagcatctaataacaatacatcatacataaacctttctacagggtcgtctatggcatatcttataggctctttcattttatgctctataaccattagattggggttttcctttagcgctttcaaaaatctaacattaaatgttctacccgccccttcataaccatgtatggttgtagagaataccaatctatcgtatttgttcattattttatacaaatatgttacatatactcctgcagcttcatcgacagcaactaaatcatattttcttttaaccaaatcttgcggttgcttatactctataattactttcccagcttttattttgttctttttttcttcatattttagctctaacttttccaaagcttttttcaaaaattcccatagcgattctatgttacctctattcggtgcagttatcccaatatagaacggttttttataaaaaacatatgtaattcccgctatccccaaaccaactgctacggattttcccctacctctatcggcagttaaaacataagctatctctttattaacaaggttttcgaatttttttaatgcctctgcttggtcttttgttacgcacatcccatatagctttttgggaaaaacctctccataaactctatggaattctgcttttggaggagcaacatctttttcgttctctatatattttatcgctttttctttgtctgtatcatatatataaacttcgtgttcaaacaattttttaacccacctttcttcgaaataatgctttacatcctttatagtatagggaggtgtaaccaaatgttcatggaatgttgttattattttatcccatttatcaatagagggagctaaagcgattattaatccagtgcctctaactaaaccgaatagccttcccaaatcatctggggttagagagttggttaaatccataataagaatatcataagttttacctaataccttttgagtttctttaaaatatattctatcgagttttgctccctttaaattagtattttctataaaatattgatatcttctaatgttttgttctctgtcttcgcttacatataatacttggggttttactctaagctctttttgatatctaatagcattttctattattcctggcaatggtttttcagggttttttcccgataatatgataaatgatctccaataatgttctatagccctagcttgagcattatcgaatactatttttagatcgccttttaagttagagtcgatgcgcatttggttataaataaatagtatttatgaatgaatgaagattaggcaacctataattactatattgggacatgtagaccatggtaaaaccacactgttagacaaaattagaaaaacagcagtggcacaaaaagaagctgggggcattacccaacatattggagcaacagaagtccctatagaggttatagaaaagatagcagagccaataagagatattttaaagttcgaactaaaaataccgggtttgttatttatagacacccctggccacgaagcttttagcaatttaagaaagagaggcggttctattgcagatttagctattgttgttatagacataaacgaagggattatgccccaaactaaagaagcaattgaaatatgtaaacaatttagagttccatttattattgctgctaataaaatagacaaaatccctggatgggaatcaagagaaggatctttcataaaaaattaccaaaggcaaagtgatagggcgaaacaagaattagaaaatagagtatacaatttagtttcccaattatatgaattgggtttcgaatcggatatattttttagaatagaagattttaggaaaacagttgcaattgttccagtatcagcaaaaactggcgaaggaattccagaattattattactaacagcaggtttagctcaaagatttctaacaaagaaattagagattgatgaaaactctcctggaaaaggggttatattagagaagaaaaaagataaaggtatatattatttggatgtcattttatatgatggtgttataaggaaaggagatactatcgctttttatggtattgaagggccaataataacaaaagtaaggggtttatttaaagcgaagcctttgacagagattagggaaaaatccaattttattccagtaaacgaagcacatgccgcagcgggtattagaatattaactccagaaaacgataaagctttggcaggttccccattatatgttattagaaataaccaatctaaaatattggaacaaattaaagaagagataagctctatagtatttgaagaaaaagagggtttagtagtgaaagccgatacattaggaactttggaagcaatagttaatatactaaaatctaaaggaataaaggtttcaaaagcaggtattggagagataacaaaagaagatataattaaagcacaatcgcaaaaagatgaaaagtatagagttatattggcttttaatgttagccctattgaaagcccagttccaataatttatgacaatgttatctataggttattagagaaatacgaagagtttttgaagcaattagaagaacaaaagaagctttctatattagatagattaactcctgtagcaaaaatagagataattcctggtttagtatttagaaggaaagacccagcaatagttggagttaaagttattggcaaaataaagcccaatgttttattaatgaacgaagaaggaaaaataatcggaagagtaaaatcaatacaaaaagaaggagtatccttaaaagaagcagaaaatgatgaagtagctatagccatagaaggagttactgttggtaggcaaataaaagaaggagatacattatatacttacattagagaagaagaatttaaagaatataaaaagcataaagatttgttaaatgaaactcaaaaaaccattttaaaagaaatagcacaaataatgagaaaacaaaaccccacttgggggctctaaattaggtctataattgttttattttcgaaatcattttcctttagaatttgcaaggctatcttatttattggcaaccaagggtattttttctttatttcacttaaatctgcttcatttaaaattattttttctaacaaattaggatcattgttttttagaaacaaatacacaaaataagctataagcttattggctattgattgcttatcaatagtctggttttcgcaattttttaatcttttcaaacaatctatgttgctttttaaactctctatggattctaactttttctctaaaatagcttttttcctttgcaatatctctattttataattaatttcttctattttttctttagttctaaggatttccaatttttttataaaatcgtcgaattctaaaatgtattctaatgtttctcccattgatttgaaacctaattcttgtgttagcaattgtagtttctcttttactctaggtggaactctaatgtgtgtcacttttatattaatataaagtacatttaaatgcgctatgaattgagattatataaagagttgtcttttaaagaaatagaaaaaataggcgaatttctttttggggttaatagagaatatgatttgctaaaaaaatacaacataaaacctttgtatatcgataccccattggaatataaagagtatcccacaatcacagctttgtttttattaaaggatttggccaaagacaaagtttatttagacgaagtaggagctagagattttatctatggaaaggatgtacatcaaaagaattttctcaaaatagaaggctacaaatacgctaatttattagttttaaatggccagggattacctttaggtattggaaaaattaaaggcaaaatattgaaaaacctatttaatataagtttttataggagatactaactaattagtaaataattttctaactatagaaccacaagcatttattaaaatcttagaccatacattatatgagaagtataactccgattattgcaatagtaatacttttattagtcacgataagcgccgttactcctttatatttatgggtacagaaaggtgtgcaaaaatattctcaaaaagctacaaaaactgcagatacaacatttaagtctataactaatctagaaatagctgatataaagatatataaaaaatatgatggagcattggctttatggtatttagatgagggttttggtaatattgttgatgattatagtaacaataattacaagcttaaatttgagggatctccgagatgggttaaaggagtacttagcaacgctttagaatttaatggaaatagctcattaaaaggaaattaccaattgcttgttggtaaaacaaaatggagtataactttgataacaaaaccatatagtcttgccaattacacatatgcagagggcacaacagatggtgacaaaatcgttttagaaattgctaacaataaatttagaattgctatatctaataactctgtaggttggcaaagattgtcctctagtttacctcttagtaaaaacgaatggtattttgttgctgtaacttatgatggagataatctaaaaatatgtgttaataatgtttgtaatagtactagtggtataaaatcagcaaccactggagggggtacagtaaaaatagcaaatggcgtttatgctaactacccctataaaggagttatcgacgaaatatatctatataatgaaccattggacaataaaactattgaaaatctatactataggctaaccgttagagtagtaaaccctaacgatagaccaataaaaatagagggttattaccaaatagaagatccagaaactggtaatataatatgtgagatcccattaaagtataaagaaacttttataacagattcgggatcagatttaataaaaccatcaaaagaagaaactataagaatggtattgttttacaaagataagcattgctctcttaataaatggaaaacatataatttttgtttaacaaacggtatcaatagggtttgtaaattgttccatccataatgggcccgcggggattcgaaccccggacctccgcctcgtgagggcggcgtcatacccctagactacgggcccagtaaataggattaataaaatttaaaagcttagatattttaattagatgcgtgtatttttggctatagatttgcctgaagaactaaaaaaccaaatatactcttattacaaaaaagtttctaaagcggtttatggcaagtttgtcgaaaaggaaaacttacacattactttaaaatttattggagaagtattagacataaatccattgatagaaaggttaaattatgtgaaattcaaaccctttgaagtaaaggtaaaaggattgtctgcttttccttcaatagagaacccaagagttgtatgggttggggcacattctgtttatttaaacgatttggcaaaccaaattaatagggttttaaaaagctatgaaaattttgtcggccatataactatagtaagagttaaaagagtattagacaaaaaataccttttagagttggctaaaaaatttgatttggaatataaatttgtggtcgatagattttatttgtataaatcaaccctaaccccaaatggtccaatatatgaaaaattatacgaattcaaatcgattcaagattaattttcttcactataaggaaagagaatattgtagaaataatagcaattattatggctaaaataaagccatgctttgtttcccatggagggatagcattgacgaagttcatcccatagaggcttgtaacaaaagtggcgggggcaaaagctatagagataaatgccaacttatttagattttcatttattcttttattgattacactatcgtttatatctaatatataaaataaatctgacttaagtgttaaaagatagctttttagtttttccaactcttttgtgttttctccaaactctattagtttatttatttttcttaatagaacattgatctcttttttggtttctaaaatttcgtctatatttaatataccatttaatgctttgtcctctaacaaatcgatttttctttctatttcagcaattttttctctaatttctataagttctctttttccaaccattcttttagagctttttctaattttttgtcctccaagctaacccatataaataaaatacctaaaggtaaaactgttaaaaagaacaatactaaaaatggataaagcattatagtaattacatccattcctattttatccgctatagtcaaagatatttgataataataatacaaagccacataagctattattaataaggagagcccaattaagaactctttttgatagtccttcacaacaaattcttttaaaaaatatttaaaaattttgtaatgataaccctagttgggtatgaattaatcgatggcattactggtaaaaacgatcccatattattgaaaatctatgtttattcgaatgaaaacaaatacatagttattgacaccgatagaaccaaatggtttgggaaccttccaattataatagagcccaaaggtttaagaaacataactataaaagctgttccaaggaaatgctatagcttttttccattgtatataaacgaccaaaaatatctaatcccagtatattgtaaagaagtaaaaaaagaagaagagaaaaaagagtattacgatgtaaatgtttctatcaatgatactataaaggtttgtgtaaatggccaatttaataacctaaaatatttagttaggattgatgatagaaagtattctggtttaattccttttccaacttgtttggagtttcctaaaaatgaaagccctgggaagcataatgtttatgtatcaatacaaaatagtaaaacaatagagaaagaattaacatactatgttaaacccatattcttttataccataaactataaaccaaaaatcgggttattaaaagaggaaatagaaataatactaaaaacctatggcaataccaaagggaaagttgaattttgtgcaaaagatttgtgcataaaaggagaattccctccaaatatagagagagtttatagagtaaaatacgactatagcttgtattttgctataggcttaatagcaggtttgtctttgttgggattgtattattatttaaacaaaaaaagaataaaagttaacaaaaattatactttggaaggcaatatagtaaaagtaaccttagagataacaaacaaatccttgtttagggttaaaggctatattttagatcctattcctaaggatgcagaagtagagatattaactaacaacgccaaaataaaagacatcgccggaaacaaatttgtttatgcgatatatgatttaatgcctggagaaacattagttatagcttataaattaaaaatgcctttcgaaataacagaaatcgatttgccaaaacctattgttctttgaaaattttttccacatttaattttcctccttcagatttttgtacagctattccatcttctccccaaataaattggtatatgttaccaaaagtgtctctaacggttctatcattttctacatatagatctcttaatactgagaccaaccttctatatagataaccgctctttggtgttcttaaagttgtatccattagtgcatctttaccagatgcagcatggaagaagaactctattgggtctaacccatctgcaaaaccatgttctacaaaacccctagcttttgcgcttttgtcccctttcttaaagtggggcaataccctatctttataaccttcttccattcttcttccagaaattgattgttggccaaccaatcctacaacttgtattaagtttaatagcttacctcttgctccagatttagctaaaatcattgtacctttagttgggtctacatgtttctctattacctctccaacttcgtctctagctttgtttagaactttcaatatttctatttctaatgtttcctctatagttctaccaggcaatggttttatttctccttttttgtatctctcaatcaaattatctacttcttttttggctttttcaataatttttcttatttgttctttaacttcttttggaatatcgatatcggaaaaactaatagttaattgctctctagtcaaataattaacagacaacctggttacatcgctaagccatttgaatgtaaattcagggccatatctttcaaataattctctaattagttttcccttttctacaccaactatttctttgtctattactccttttaatagtatgccattttttataacaaattctccattttttgtttttatttcgaaatctaaatcatctggcaacaaagcagaaaatacttctttgccagtcaaataatctcttccctcctttttggctttttctactagttttaatattttgtcttttccaaaatatttgcaattgtattcaattaattgtattgcatctttgaaaggaattttatcttttaaggataacaaatatagccctgtaattatgtcttctgtggctccaataatggctaacccataccttggagtaactatatgttctctaacatttgctaaaaattctatttctgttttaccttcgtagttttgtactaaatggtaattcatttcatctccatcaaaatcagcattgtatggggtagtagttgcagggtttagcctaaatgttttgcctggcaatataacagatctatgccccatcatagacattttatgcaaagatggttgtctattgaacaaagcgtaatcgccattaataatatgtctctcaacaacccaacctggctctaatctttcggctaattcttctttattttcttccattattttgaatctcctaccattggggtctataacatagtttgccccatctaaagattcgggtccattcaatactttttgttttagccaatccaaattccattctgttactatttcagggaatgttaactctttcgctacttgttctggtacaccaacttcgtctatatctattcttgggtctacactaattactcccctcgcagaaaagttaactctctttccagctaagtttctccttagcctaccttcctttccttttattctttgtaacaaaccttttaatggtctcccacttctatgcctagcttttggtacattaggtaattcgttatcgaaataggtagcaacatggtattgaagcatttcccagttttcttctaaaattggctctggtgctccataggataataattcttcaatcctattattaatcctaactatatctgctattttatgagttaaatcgtcttcacttctttctccggtttctaatattatagatggcctagccgtaactgggggcactaatataacagttaaaactagccattctggccttccatttattatgccaaacaatttagcatcttcgtctggtattttttctaaccattgccttacatctaaaggagttagtttaacccattcttctttatcgcctatcttttcttttatatagaaataccatggtttttcgaattttatttcttttagttctgcattacagtatgggcatttcttatgctttttcctgtattcatttattttcggaattactgtggattggatgaaattgcttaactcatcatatttgccttcattaatatattcgtttatcttttttaggaattgttctttaagcttttgaggtattattgctcttccacattttgggcatgtgtattgtaataatctttttatttcgtttaggaattttacatggtatacagggcgagccaattctatcctaccaaaatgtcctaagcattcaccatatttgcccccacaggttttacatcttaaaccagggtcaatgacacccatcctaggatccatggggccattttctattgggagaccatccctatcgtatggctctggtattttaacttcaacaacagacagtttccttataacttctggatccaaaggtctaagatctattaaacctaacttttttatttccactcgaaagtatttattagggaattaaagcctttcatatgagaattaggttgcctttgtataaacctattaaagaagtggcagaagattattataacaaagccaaaaaaattaaagaaaaaattgaaagagccaaagctttgttaaatgaagaactaaaaaaagaagaaagaaaaaagaaagaaataaaaaaggaatggtttatgaagtatagatttacttttactgaaagcggttttttagttattggaggaaaggatgctaaccaaaatgaaagaataatgaaagtttatagaaaggatggcgatttggtattccatgccgatatacatggggcaccattcgctttaatgttattgaataaccccaatgcagatagcgttgaagaagttatagaaaaatataaaataacggaaaccgatttaatgcaagcagcaggtttaagtgctgtatattctaaagcatggcaagaaggcttagcttcgatagatgttttctatgttttgggcaagcaaatctctaaaaaagctccttctggagaatatctaaagcatggttcctttatggtttatggcaaaaaacattatattagggtgcctttgagattatacatagtagaaaaagaaaaggtctatgctgtgccttccatttataatggggacaaatacatagaattaattcctggcgatattaagaaagaaaagatagcgaaaaaaattgcagaattattaaatgttagcgaagattacataaaatcgcttttgccttcaggttatttcagaattaccaagattaaaaatatttgataggccattctctaattttatctatgtcttggccatacaaatctcttatatcatctattcctaaagcgatcatcgctaatctatttatcccaataccgaaagctcctattttatgttttataccaaaactgtctaatatttgttttcttaacatccctgctccagcaacttctacccagcccaatttactatggtatgcatatacttctacggatggctccgtaaatgggaaaaacgcagggaatagttttattttctcaaaccctaatgcttttaggattttttctatttctgtttttaattgggccatgtttgagccaataattattccctctaattgttgaaactctatatggtgggttttgtctattgtatctggtctccaaacagagccgatgtaaaagtatttgcctttctcgttatttagaatatctcttaaattatataaattccaagctgtaattgcagtattttggcttcttaatattgttagatgtgcttccttttctaaatagttgccaaaatattgtaaatgtttttcttttactttttcttctatgtcttttggtacatccaattcgggttttccttctattataaaggattctgccaattctctcgatggatggtcataaggagtaaataaagcctcgaaacaccagaacattgggattaattcatattccatagcatttagctctttccatccgaggtttaccatttttttcctaacccaatttaagtattctctataataatggggcttccctccatagtattttggaaattcctttatattatagggagcaattggcttttctttatataattttttctgtaatacctctgtatcgattttatctattccttctacaacatcttttggaattacttctatataaaatcttgttttggtttcttcctttactaaacctcttttctttaaataatctaaatatttggtatcgatctttttacctaattttgcttctatttcctttaaattcgaaaggtctttctttaacccttcgtttattgctaataataagggttcccatgggaattcctttatctctctctttagttttattttcccatcttttatttctattagatctaaattctttaatgccccaattgcaatggctttttcttctttggttaatggtatttgatctaaaggcaattccccatgtaattctaataaagaatataattttctttcaggcaaattcttataactttttttacctttttccgttaaaacatagtatgtatctttttcttctttaattttaactaggcctttttgttgcaaattatatgctatttttagcaattcttcttcatccatccctaaaaggttcgccaattcattagaatacccattaatcaattttttgtatacttcatattctttgggtcttagcacaatcattattgtatagaattaaaaccatttataaaataccctatagattatacaaatggccaaaggccaaatatgtgaagtagctattgctaggttattcaaaagggtttatgtttgccaaaggtgtaaaagaatctttagggcagatcccgcaaaagttagagaaggcaaagttaaatgcccaagatgtggttatagaggaataagaccaaagagagaagtgccaatgggtatatctaaataaattattcttcttcctcttctttttcaacaatttttggtctttctattacaaccctataatatatagtttttccagcagtggggctttttcttattattcttaaaacatccccaggcttcgggtttaagtgttgtatagcaggatcgtcaacatatatttttggcaaatagtctatactatcaatatttagctcttttaatagtttttctacttcttctttagttagcttttggtattctggtactagtctatgttttattggttgttttttcttcattcttctacagttattttagtttcaaactcttcgaccggtacttttaattgttcatctttaccaattactcctctattccttaaatattctctcgctaatatccaatatattaatgctaagcttttagaacctctattgtttgctggtatacagaaatcaatataatttttagtatggtttgtatcacataatgccaaaattgttatcccactttcgtatgcatcgtgtaaagcatttttgtccattattggatcggtaattaatattacttctggttccatgtagtattttagttgggggttagttaatgtacctggaggatatctcccagggaaagctttaacctttgttatttcagaaaacttcttaattggggttattgctgtttctcttcttcctacaactaaaatttcatttggttcataataggataacatctttgatgctaatcttaatctttcatctatttttcttatatcgaaaatagctaaaccgtcttctcttatcttagatacataaggtttcatatctttagttaggtgccttgtaccaatatgtataccggctttaacataaacatttattggaactagagtatccattttgattgcttgttatgcattttaaaaacaataaaccataataccatatggagtttgagaaattggctaacctttttagtaagctcgaaactatatcggataaaaccaggaaagtgcaatacatcgctcgatttcttaaagaattaaaagaccaatataaagaaacattgttgttattgcaaggaaccgttttttacccatgggagcaaaaaaacctcggtattgccgaaaagggtgtaataagggctatttctatagcttatgggatagaaaaacaaaaagttgaagaattattcataaaatatggggatttgggtattgtggcagaaaaagcttgtgagatgagaaaacaaaaacccttattattaaaaccgctaactgttaaagatgtttaccaaactttaagaaaaatagccgatatagaaggagaaggctcacaggacaaaaaaataataacttttgctaagctattagttaatgccaaacctaaagaagcaaaatacattgttagattagctttagaggaattaagaattggagtaggtgaaggtattattagagatgcgattgctatagctttttctgtaacccccgaggctgtggaatatgcttattctatattattagattttggagaggtagtaagaattgcgaaagagcagggcgagcaaggtctatggcaagtaaaattacaagtagggagaccctttagagttatgctcgctataagagcaaggaatgtgcaagaagcttttgacattgtaggaaggcctgcaatgatagaagcaaaatacgatggttttaggttacaaatccataaaaaaggagaccaagtatggctatggactagaaggttagaagatgtaacaagacaattcccagatgtagttaatatagtaagaaacagagtaaaagctaacgaaataatatttgaggcagaggctgttgggtatgataaaaagactaacaaattcttgccattccaaaagatttctcaaagagtgaaaagaaaatatgacatagaaaaaatggctaaagaaataccagtagagctacacgcatttgatatagtttatttagaaggtgaacaattaatgaaaaagccatttaaagagagaagggctctattggaaaaagtaattgatgaaaaagagcatgaaatacaattgtctataggcattatagaaaaagatgataaaaaagcttaccaattttaccaagattgtttaaataaagggttagaaggagtaatgttcaaaaaccttaatgcaccataccaacctggaagaagggtaggatatatggttaagctaaagcctactttagaaacattggatttagttatagttgctgctgaatggggcgaaggtaaaagaagcggttggcttacttcatttactgtagcagcattagataaggatactggtaattatttagaagtgggtgaagtcggtacaggaataaaagagaaaaaagagagagccgaggatataacttttgaggaattaaccgaattgttaaaaccttatatatataaacaagaaggtaaaaaagtttacgtaaaaccaaaaatagttgtagaagttgcatatgaggaaatacaagaaagcccccgctataaaagcgggtttgctttaaggttccctcgtattgttagaattagattcgatagaagcccaaaagagatagacacaatcgataggataaaacaaatatacgaaatgcagagaggtggtatacataaacagtaataaaataaatttttaatatattacattatatttagataccatgggtcctcgggaattgttagcggcggtagaaatagcccaagccgaggggagagaccctcgatgtgttaggaaaatacgagttttggaaggagaagactttttagagttagaacatataggagacaaaacagccattttaattaaaggaaatatcgccacattatattggagaacaaaaagatatctgccaaagatctatattaaaacaaaagaatttgtattatatactaagggtaattccatttatattcaattacctattgccctgtctattagggctcttctctaaaattttccaacttaaataagaaaataccaaagctattggagacaatattatataatacatgctaaataataaaagcactataatgaaagaaacccttaataaataaaatactattgttgcttcatagtccctattaattaaatcttttagcgattctattgtgaaagctaaaaatattggtactaacaaatagagcaaaggataacccatggaaagaatcaaaaatagcaatgttagcccattatataataaatggttagtagctaaatagatttttctatatctatcgtaccaatcctcttttgctaacaaaaatgcttgtatatagtatgggattaacaataaagaagggaatattactacaattagatctaataaaagaaaaatatatgtattataagccattttctacaactctctttattacttctgcaaccctctctacatcttcaatataaacgaactcgtttggtccatgtatattattttcttccctcatggggccaaattgtataacttttatacctcttttatagaaatggtatccatctgttcctcctaattctaggattttcttttctcctaacaaatcttttgttagttgtatgaatttgtctacatgttctccatcgctaacccatgggggtaattctaatttgtctttctctattcttagttttatgttgtttttggatgcgaattctttcaacaaatcgcttaccttgttaaaaacataatcattatcgtattctggcactgttctagcgtttacataaatttttacttctcccggtattatgttaataacatttggtttaacctctatctttgtagggttaaccctaactggtactctatcgtaatgctcaataaattggtatttagacaataaagttttctcaaaagctttagaaatatgttctataaactctataacctttgcggcattgtatattgcgttttcccccctataggcatgggctgaatgcacttgttttccttccacatatatgtttattcctaggaaaccagagctacctatagaaacataaggccccgtatcgataactaatgctatatcgctatctatttgttcgaaaaattgtgttgattcttgggtttcttctcccccggctatagctaatatgggttgtacatttatttctttagcattttctattcctgcaatagatgctactatcgctgatttgtcatctgcagcacctctagcgattattttgtttccttctacttttggatcaaaaggatctgtgttccaaccttctccagggggaacaacatcaaaatgtgtaacaaaagcaactttcttacctttcccggggtattttgctaaaatatttggggtatcgttttcgctgtaaattatttcaacatcaaatcctttattttctaaatagttttttataaatttcgcagctttctctttttcttctttgtttggattaaatgttttgaatttcaacaattgcaaaaagaaatccatatcaatcatattctaaaaaagggttatattttataaatgtgggccgtactcccaccatggtaactcatccttggtcttacttgtattggtttaactaattctttttcatcgtcaacaaacaaggcagccccaggcctattgggcaaatttatagcaaaatattttctaaaatctatatcaatgtaattgtacaaaatagaggaaattgattcaatatcgcttttattagttagtctatgtgctattaaagaatctatttgagttaacgcatcatctattaatttattgggttgttgtgttgctaatactaaaccaactcctgggcctcttccctctctaattaggttaaccaaactatcctttactgggctgtctatagatttgtccaaaaattcgtgtgcttcatcaataaatagccaaaacaatggaacttctctaacatattcgtcagacgcttccctttttatttctttttccctctcttttattctaatttctaaaatctttctggctaaaatatttaaaaccgctcttttagcatatataggcaaatgtcctacccttattatatggataccagggttttttattttttctattatagatggccctaataatgattttaacaatttatatctttgtttcaaaaaagggggctctttattatttatgaaatgttcataaattatatcgctcttgggatctgtttcttccaaagaaaaaaactctaagagatcataaaaacttaaatcctctttagaaaacgtgggctctatcatatttattgcaaatttttttggttctaaattccattccgataacaaatcaatacctctataattagggtattgtaaagtatggaatatgtttaaggtatcaaaaactattacagataactctttattatttgcttcggcgaacccttctaacaatactcctaaagtaaaagatttacccgtgcctctttttcctacaactaaagtatatctaactttgctataatcataatagataggctccccataaataaagtttacaccaacctttattacttcttttcccaaaaatatcatcttactttaggccctattatatagttgtcttccctatatttagcatttttccacaaatcaaattcctttttttctggtatgtcttctctagggtttcctgtaacatctataggcaataaagctttttccccatcaaggttttcaacaatactaaaagcttttagtatttcttctatatctttttttaatttttcttttagtttttcgtctaattttattctagctaaataagcgattctatcgatgtccataaagtttattcttatatccttttaaagaccccaggttctatttcatagaactctctaaagaattctgaatcgagcttttctctaaattcctctaatgttagaccaaacttttttagttcttcttctaattcctccgctttaattacatctctatctttgaatttttctaataaatacttatctatgtttttttctgtttcttttggcctttttatctcataagctgttctaatttttgagcctaacttttctatatcggtctctaacaacgctcttttggctttttctattattgggatgccaaatttttcttctatagtttttgcatctttataaggataaatgtccaacccatgatctttagcaattacttctccaactctatatctgttattctctatataagcatctatgtatattctagttttacttgaattgggtttgaaaaccaattttacacttccatcggtaatagatatggctttaggtttctccaactcttttcttaaactataaatttcttttctaaaatcaatattcatttttttgctataataaaagccaaggaattcttcaatattctctaaagcgaacaataatagccaaacatccaattcctcttttgttatgcctaatattttagatagtttcccttttatttcatcaatattcacaccataatggaagaccccctaataaaaatattaaagcaattttctatagaagatgcaaaatatgttgaatacaatttggatagacaattcctagctttgaaggaaaacccaaaacctgttggtttagtcatagctaatgctttaatatcttaccaattaactatgccaggcgagagatattgggagctattcgcgaaaaaagttaatagctttaacgatttatatgatttcgtcaaaaaatataatcctagatttttatcgaataaactaaaaaggttagaaaggtttaagccttacatagatataatagaacaaaatcgagagcactattatgaaaatatggttgctctgaataaatttttggccaaaataatgaaccaaaatatttacgataaaactattgttttttctataaagatgtttgcatatgctatgagagctttgggctataaatttaagcctttcccatttgaaatagctattcctttagactataggctaaaaaagataaatcccgatctaaattattggttttatgtgagcaaacaaaccaacataccaccattacatatagatagtttgatatggcccatatttagaataaaaaatttgcctaaaaagtttgccctattgaaggaatatctatcgaacctttaaatttgttaaccaaattaatcgatggctgaaaaagaagttttgttacaacaaattttgatgcaaaaacaagtattagaagcgcaattggaagaaattaacaatgctataaaagagatagaagaatctaacgggaaagtatataaaatactaggtacatactttttagagataccaaaggagaaagcattagaagaattaaatgaaaagaaaaaactattagaaatcagattggatgcattgaaaaaacaagaggaaaagctaaagggagaataaattctttcattacctcttagtggtagaaaaaaaattaaatcgcaagaggacacatctctatgcaagacataaaagcttttagggatgattttttattaattcctttaataagaggggtttttcgggatcccacaaaatggaggattgttataaaaaatgacactcccaaatgttttaaaggtatccctgtttgtactaacattccatcgtatgtaaagagaagagcacttactgatatagatattttattttatattaatgacatagcatttgaaaagaaaaaccttctgcaaggatataaaaaaatagtgtatgaagaggccgatgttaacacaaaagagtcccaattaaatgaactaataaatactgctgcaataacaataatgaagcaactatttactcaagctctcacaacaatatatggcaaactatatcctaaaaaactatatatcgatgttttgggaggaaaacccaaaaacgaagtttattggggggttattataccaccaaattatctgctcatatcggcaaggtttgctcgaagtaaaatatggcttagcgggttaagctatagtttgccttttaatgcgagttctattattaatgcatttttagaatttagtaggacacgtaaactgggagcaagcttttataatacttatcccacttatacaaaacatattgaaatattaaacatacccccaaacgaggaaagcataaaaaatttagcaatatctttaacatatgcagaacattctggatgggatattgatacatattgggaagtatttaattatttaagagagtctttggaagattttcttagatatggagtggaaaactaaaataaatcctgtaattcaattaactctatacctgttgtttttgagccaacgactattcctttgtcatttaacaaagctgcagccccaacaaatttgtcccccatatttaatgttacaggtttagcatcttctatatctatataaatgtctggattgtgcaatagcattttgctattccctattagagaactgccaacttctatgtcagtatcaattaaatacaaatccgcatttagctttttagctaaaagctttgcttcttttttagtatcctccgcggcaaaaagcaaattctttttgggccaataataataattattgcctaatgcattattaacaacatctactacttctactctaaatagttcttccaatttttttaattcctcttcataaatagaagaaggcacaataattaagtctttttttcctataatgaaactaccaaccgttggagttccagctattgtagttttcactattccttctaatcctaatgtatcttttattattttttcctcttctttcgatattacttctgataataccgctatatcgttagctatatatccaaataaccctatagagtcgctcccatatattttaattttattcactcgcaaggttcgaatatagtattgcgatatttataaaggttatgcattattcttagtatgtgcatcttctgtaaaataataaacaaagagatacccgcatatatagtatatgaggacgatttcgttatagcaatattagatatatatccaatggctaagggtcataccttagttattccgaaaaaacatgtaactaggctaaaagagctaagcgaagaagaagctaaaaagctatttgctggtctaaaaaaagttatagaaaaaatagagaaaatctctcctgattataatataataataaaccaaggtccaaaggcgggccaagaaatagaccatttgcatatacatataataccgagaacaggagaagaaaaaatattttataacattaggcataagcttacagaggaagaggcaaaagaggttttagaaaaactaaatggttagagtaatagtagaagggaggggcgaatataatatagaagcgaaaactgtaaaagaagtgttagaaaaacttaatttgaagcctagcgaagtagtagttcacgatggagagaacattttattggaagaggaagagattaaaagcgatactatatatataactttggtcgcttccggaggctaaggcaaagtttttattactatagaggaaaagtcattataaaagcttaccaaaatcattataaaagctgctaaaccaattaaaattaaaaccaatttaactatttcctccactttttattttttccaatattttttctatctcatttacatcaacatattttgcttttttggttttttcatcaacataagcgatgtccaacttttcagcagttaattcattattattctctttgtagaaattatacaatgcctttaatcctagttctatcgcttttttaagggagaggttttcgttatattcttttcctaaataatccaaaaccttctgttctccttcccctataacagctaatttgtattcccaaaacattcctccaggttcagtaacaaatatgtgtttgcctgtatcatctatgcctgcaaaaattatagagaccccaaatggccttactcctccaatttgggtatattcctgttttatatcggctatctcttttactaaccctctaatatcgatggggtggccataaaaatatttgtaagtttgtgctataactcttgctctctctattaaaactctaccatctccaattataccagcaggagcagcgattacatggtcgtcaactatgtataccttttctatggatgaaggtattacgaatttctcaacaattttcttatctccaataacgaggacacctgttttataaagcataccaatagcggtaggggattgttttactgttgttctcgcatattctacttgtaacaacctcccatcggggctaaatagagtgctagctctatcatagcccattacttgtggtaattgcataaaatccatctataatgctattaaccatttttataaacttttatatacttgcaaaagtgaaatgctcctattgtgacaaacccgctatatattacgatggaaaaaaatattattgtaaagagcattttttagaatattttaaaaacttggcattcaaagcgattaaagagtttaacatgttttcgcctggcgatagggttgcagttgctgttagcggggggaaagattctgtaagtttattacattttttaactaaacataaagatgaattggaattaaaagaagttgttggtttagctatagatgaaggaattaaagggtatagagatgtaactttaaattatttgaaagatttcgctaaaaagcacaatcttaaaattaaaattatttccttcaaagaagagataggattaactttagatgaaatgttcgaattaactaaaaaatataatttgggttattggccctgcacttattgtggggtatttaggagatggttgctaaataaatatgctatagaacatttcgatgttttagccacaggtcataatttaaatgatgaagcacaaacagttatattaaatttggcagagcataatataaaggatttagcaaaaggcggacctgttactggtataaagagacataataaattcataaaaagggtaaagcctttctattacattacagaaaaagaaacaacaatctattctattgttaacaaactaaatgtaccttatatagaatgcccctatgctaggggcgcttttagaatttatgtgcgagatttgttgtataaaatggaacatgttagggaattacacgaaaacataataaagaaatacctctcttttagagataagttgcaaaaaaggtataatttcgaattgaaaacatgcaaaatatgtggttttcctactactagagagatatgccaagcatgccaattaagattaacctttcaaaaattgaaagaaaaaaacctttagtttattgtggtaaatttccctctcatgttttagagtaaagttatatttttcagcatactttaatacccattctttatggggggataacaaagctaaaactccattgtcttttaatatatactctgcttggtaaaacaaatattcatgaaccttctcgctttcttctctgtctgcagcttttataccatagggaggattagtaattatataatctatggccttttctcccaatttaaaatctacatcttccaaatttattttagatactttaactatatcttttacccttgcatgtatgcaatttagctctgctcctctcatatgttttacgaatttatcaaaacacaatattttggctttcctatcccattttattgattgttctatttcatcaattatatcgggatttaattgataggcaaaagttttatcgtattgtctatataatggagggatttcccttaaatataaagctgcctctattggaattgtgccagacccacacaatgggtctaacaaagattggccattccatttggttaatctaattaaagaattagcaatagttggagctaaacctgcgggatggtaatatactctataatacctcttatctaaaggttgttccccaattaaatcatatccaaaaatagcgatatcttttaatatgtaacctctaaatattacatctgggttggttagatctactttattattggtttttcttctaataacatcgcccaacctattatataaatccattatatctatgtctatatcatatttgtgcgccctaacagcaaattttttatttattatttcgctataatctatttggttcgcttctcttataatgctatctatgtttggttcactaaaaaattttacccacaatactcttttagatgtttgagtttttagagctattttaactatagaatccaagtcctttaccttgaatatattaataaaatcgtattgtttatcaaattttgcgcctagactctctatttcttctctatttatatcttctaaacctttattagctatagtagcaatgtacataaagggaattaaattgccattttaataataacaaatgcaacagaattttgttatttacactagggctaaaaaagatgctaaagctttgtcgcatttaaatttaccttttgaaataaaaactttacaaggcataaggggagaagagttaatagaaaccataaaaaatatggatggtttatattataaattgtttttattgggcaagagagatcccgatgtagaagttgatagctatttaactgttatacataaagttccaaaggcaaatgtaagaaatgttaaactacctctattaaaaaaagagctaaaaactgctttatataaattcattaccaagccctttaatatagaatgtgaatgcgatgttggtttatgggataaaggcataatacttttcaaaaaatacgaagatttgtattattctaatggaaaactagttaaaaaaatagatagaattaaaggggaaataatagaatatggcgaagccgatggagaaaaaccctatatagatataaaagaaaaagttaatgaagctatcgaatttattaagcaatttaaagattatgaaattgttatacccttttctggaggaaaagattcaacaacagtcgcaatattagctaaaaaagctaaagtagattttgatttggtttttgtcgatacgggattagagtttaagcaaactttagagtatatcgattatatatcgaaaaaaattaagcctataaatatagtttatgcaggcatagacaaaaaatacaaaatgttcggttttgattatctaaagagaagactatgtactaaagataaaataaccactttatataattatgtaaggaataattacgaaaaccctgttctattggttggggatagactaatagaaagcgaagctagattgtttagacctagaatatttaaagatgaatttttggttgcacaaccaattaagtttttttcttatgctgacgaacaaatattgttagaaaaggaaaacataaagcttaacccattgtacgaaaaaggcttttatagagttggttgtaatgtatgtccctttttagacaattacgaaaaatcaatacctctctaattcctttatttctgcatttccctcagttagtttctctattttttctataaattcttggtatatccctgcaggcaaacttaatattgcataataattgtcagaaaattcttctttttggggtctaaacgatttaatataggaataagctttgtagatatattcgtttggtatttttatgacaattctaattttttctcctttcaatggtataatcttttttaactcttttactatgctttccaattgcgcttctgcgggctttgttatatctatgtttattttagctttttccatagctagttctattctttgatatgtgtatggcaaacctgttctaggatctatatagtttttcctaattaattctattatttttctttttaactcttcttttatttttcttttgtactcagtagggatttgcaattggcctttctttattatttgttctgcaattacataaacatctgttgttttgaatactttttttaatacttcttcgctttgcctttccccagttttaacattcctaaatatttctggcactaacaatagtttttccttatcgtatggtttgccctctttcaattttattgcttcctcaaaatcaacatatacttcaaaagtttctttccctatttttagtctagctattacttccttcatatatttgtttttgcaattgttttaaattattttttaggctctctatgcatggttctttaactaatgggttaccttgccctttacatttctcataagtcttttcatctaacaatggaataatttttatatttaactctttagatgcgtccattacggctttgtatgttaggctatccggtttcatatatacagtatagtaattgtattggtgccttcttaggaattctttaacccttttataggtaacccaataatatagtttttttatgtcttcggtttcttcccattcaggccaatcataactattaaagggccaataagtatggaattcccatggtattatgccgggattagaaactataactctatgaattctattaaatatttgaaatcccgaaatagctctttgtattgttctatgagttttagatttataatacggcttttttgctgcacagggcaaaaacattaatatgtctttttctttaggcctttcatatattcttataatataatcgaaccatgcttcgtaaacttcgttaaccaaattctctactttggcccctttaattttattgctataatacttttttatttgttcattgaatttaggtataaattttagattttcataatctatttctatttttggattgtctttatatttgcttactatagcttcaaactcttctttcgataatggtttccaacaactcatagatgggacaaatcgtaatcttttatgagctttattgtatcatgttttatactccttatttttaatggcatcggtaacctaaattctaccgagtaaaagtaagctgtatatttgggcaacccttttatagaagaagcgctaatccctaacatatctgcaactctatttatgtcttctctagcagttaacctaaaggctgctatagttgttagttgtgacaataattcgctatctaaaccagaagggctttgcgccactactaacaaatgcacattaaattttcttccctccctagctaaagtaatagcagtttctaacaaatcttcatatgttctatttaaataggcatgagcttcttccataactatataaatattgcttttttccaagttagataaatcaatttccccagtttttaataataatgtttcgtataatagtatactcaataccgcaccataaatttttgtgcttagcctttttgctttcaatcttattacatttatttggttaggaactatcctttctattatatattggttgcctatacttggttttagcaataatagatctttggcaaacctttctattgctctccatcttcttaataatctaattcttgttttgtcataatcctcaaccaaattcatagatagcctatttagtttttgctttagctctctaaactcttctaaatttttatttccccacatggtctcaaagaaatccgctatagttctattctcgaacaaagaattgtccgcttcatacaacaaatctaaagtattaaaaagaactgtatgtaggttagtataatttgggggtacattaaataataattcatagaatgatacatattcgttagggtttaggttttttatatctatttttatttcggggtatttagcataatctccaaaagcctgttcatattcgccatgcctatctaatataattattgtagcatcgggatcctcttttttgatttgttttaatattagtttaacgaaattggatttaccactaccggtttgaccaaaaaccccgatgtggggcgagaatataacatttttgttagtgtatatttttatattgctggctttccctatttctatactacctttgggaattgctttttctatctcttcttcttttgctttcctaattaaaacattgtgtgttgggatatctattatttcgctatcattttgggctaataattgtataacatacaaattttttcctctattttcgatccattcactttcttttaatattctttcaaattttagatcgataaaagcttttcctatttctcccaaagtaaatcttttgtttttaactataccgatccatttgtcttggtttttctctataattacataatcatctaaatgtaaattctccttagtaagaatttttatttcttctctatccgcttctagcactacagcattatattccatttttaatacgaaaatacttaatttaaatatgcgctatcttggcaaaaagagagttattttatatgatttatctactgaatcgggtaaattttatgttaatgggctagttttacacaataccgattcattattcatttctggggacaaagacaaagtattagaatttttagagaaagtaaataaagaattacccggtaaaatacaattagatttagaagatttctatgttagagggatattcgtaaaaaagaggggtgaacaaaagggggcaaaaaagaaatatgctttattaagcgaacaaggttacataaagctaaggggcttcgaagcagtaagaacagactgggctcccatagttaaagaagtccaaacaaagctattggaaattttgctaaaagaaggtaacatagaaaaagcaagacaatacataaaagaaattattagaaagctaagaaatagagaaataccatgggagaagcttttaattacagaaacgataagaaagcctttagaaaaatacaaagttgaagctcctcatgtggcagcagcaaaaaaatataaaaggttgggctataaagttatgcctggctttagagttagatatttagtggtaggtagcactggaagggtttcagatagaattaaaatagacaaagaagttaggggtaatgaatatgaccccgaatactacatagaaaaacaactattgcctgcagtagagcaaatattagaatctgtaggtattaaagacacattcacaggcaaaaaactaacagatttctttaaatgaacaggaaagatcatttcctattaacattaccttgggcttacatattttttaggctaaaatatactaaaatacaagcaataattttagctattttatgtgcttatttgacatttttgccagatcttgatttggttttaggaataaagcatagaactataacccattccttgttaatagtgttattattttttattctatattatttaaccaaatttttcttctttgaagtattagccttagctttccttttccatataatagaggattcctttactagtatgggcataaaattgtatccattaaattatagaattagattgggtaaaaccggttattggattaatgtagcatcaataatttctttattattgttcatatggctcgctttaaactattgattatataataaaaaatgctcgaaatatgggaaaaactaataatcccgataatagtttcttttgctattattatattgctagataaattctttttcaaagacgataaagcttttatcttgcttagaaagaacctatacttaggtttcttcattggaactatatatgcggtactgtatttctttaacctaaaaattttgggtgatttggttgctataatttatgcagcaaagcttttggataatattatagttatatatattagaaggattgttggggaatttttcaaaacaaaagaaacagaattcgctataattttgattgcaagaacattcctatggcttaccgcagtacatatggttttatcttcttttggaatagatattgccccattattgacttctttgggtataggttctatagttataggtttggctttgcaaagcacactatctaatttcttttcgggaatggcaatcgctagtgaaggtattttaaaagaaggagatataattgaattgcccgaattaggaattaggggcactataatagatataacttggagaggagtacatattaaaaccataagtgatactatcgctattatacccttcaattacataaacaacaatataataataaacaaaacgaagcattggccttggtattggggtagaataaatttcggtatatcttattatagtgatttagataaagctaaacaattaataagaacaatcctaaaagaaaaaggtttagaaggagatgtaaggtttactaattttggcgataacaatatagaaggagtaatctttttcaaagtttataatattttagatgaattaaaatataaagacgaattaattagagaaataaaaaggcgcttcgatagggaaggcatagaaataagtttcccgaacaggaatatctatttaagaccagaaggcctagacaaagttttagacattataaaacggggtttgcaataggtatagataattcttttgctttttctaatatttgttgccttttccttttacctacagcatggtgtataactgctatttctccttcttttatttttgttagttcttcaacattatgtataataactggttttaatccatttggtaataggcctctaacttttctaggagacctataacctggttctgggggccttggtttacctttcattttaagcctaaatttattgtccctaccatggccccatctccattttggatcatttctgaaagcttttttcctataccagttggttcttaaaaattcaggtttctttctttttagttttcttctaatctttagataatggcccattcctttaggtttaattattagtttaaaaatcaaatctttttactactagatagtggtaattgcgtcttttcaaatatctcttattgacctaaagccgccgtgcccgagcggtcaaggggcctgcctgctaagcaggtccccgtatgggggcgggggttcgaatccccccggcggcgctaaagctttaaatgttttataataatctctctgggcccgtagtctaggggtatgacgccgccctgacgaggcggaggtccggggttcgaatccccgcgggcccatgtattcactaaaccagaaaaacattccatttaaaataacttattttaaagagtaatgtggatataaggaatttagaaaaaagaattaggctattagaagaaaggctatcaattattgaacaactaattgaatcactaaattctcaattggttgagctgtcgaaaaatataaaatataaattgtacacaacagaaaacgatttagaaacaattaaaagaaaaattgatttaatagagaaaaggataaaaattttagagcaagaaatgaattttgttgctacaaaagaggaattaaaggctttagaaaaagaaattgaatacctcaagctaataaaatgatagagctattgttgtatggattattctatattttgggtatatttctcatttcatttttcgcttcccattcatatagcgctttgaattacccaatagagaagcaaattattcatactattgagattttagataaactaaataacaatagcacggtttctataagatacaataatgtaaatgtgaagattacatgtggaactaatattgtttacattggtaactctataatagtgccatctaaaagattgtcatgcgattgtgataagcccccatacaatgttgaaataacattaaaagatggccagataactataaaatgcgagccattaatgaagaagtaatggctataatgataattttagttttattaacaattacggttttgtttttgacagtaactccaatatattcaaatgcacaaatagaaaaagccatagatatagttaaaaaagacatacatttattacaatgagagcgggtatagctgatgcaactatagcagtaatcttagctttaatattaactatgatgtcattcacttttggaatgctctattcaataaaaggcaaaattctttgtgaataccaaaatactaagatagaagatttcccaaaagggccgtgttgctatcctatatactattttgagaatggaaacgtgttaaaaaaatatgtatgtcaagaacaaagtgaataaagcaaaaataaggataactaaacaaaataaaagtaatactgcttgaaagcatttaaatgatagtgttctaaaataatatgcaggtctccttaacaccagtatcaaagaaagacatacatttattagaaacagttttgttagttaaaaccatattcagaccagatgtaatagagatgataaaagacccagcagagagagtaacatggttagactctttagctgttgcagctggggcatttgctagaaggcaagcaggcatgtctattccagaaatagcagaagaacttggaagaagtgaagcaacaattagaaaacatttgaaccaagagacaaaagctggtaaattagttgcagaaacattagaagagctaagaaaggccggaggtaaagtagagttcgaagttatagatgcattagaatacaaagctaaagtaagcaaagtcaaagaagagctatccaaagctttagaagaagttaaagacgctttaaacaaaatcgaagacgctttaaattctctataaattagatagagaatatcctattatcgatttttataaattattatgtctctctatttaatgcaaatcaaaggttgggtccataaagttagagatttaggtaaaataaagttcctcttaattagggacggttataaaataatgcaagctgtaataaagaagggggagtctcctgattatttattggatttagacataccaatagagagtgctgtagaaatagaaggtgaagaaagggagaccaacggcaaaaaagagatattagtaaaagatttaaagatattagcaaaagcagaaccattgcctatagatcctaaaaaagctactcctaaaaaaaggtttgactatagaattatagatctaaaattgccagaaagacaaaccttatttagattaagggccaaagtacaaaaattctttagagattggtttatggaaaatggttttgtcgaaataaatactcctaaaatagttatcataggagcagaaagcggagcagaggtgttcccagtattgtattttgggaaagaggcttatttaacacaatctccccaattgtataaacaaatgatggtttcggtatttccaaaggtattcgaaattgctttcgcttatagggcagagccatcgaggacttcaagacatttagcagaattcacttctgtagatgctgaaatgggatttataaaagatgaatatgatgttattaatacaataaagaaaatgttaatcgatgttagtgaaaaggcgatgcaaacaaaagaatttgaagaattagccaaacccatagatttgggttttgagattattacttttgatgaagcaaaagaaatagtaaaaggcaatcccaatgaagatttaacaacagaagaagagagaaaattaggagaacattttatggaagagggggtaagctttgtagcagtaaccaaatacccatggagtgaaaggccattttatactatgcgattagatgataacccatcttatacaagaggttttgatattatatttagagggctagaaataataagtggggcacaaagagagcatcgctatgaaaagttattagaaaacataaaagaaaaaggaatagatccaaacaagttagaatattatttaatggctttcaaatatggtatgccccctcatgggggatttggattgggattagagaggtatttaagacaattattaggattagacgatgttagggaagtaatactcttttatagagacatagataggttattgccgtgacaaaatatatagaatacaaggggtttaaaattaaagagcgctttgtaaagcattatgaaaaaattgttgatgatatagatttgttcttagattggagtttaagaccattaaaaaaagctattagggttaacacattgaaattaaaagatgatataggtaatttaaacaaagaaaacccatttccaaaactaataagcgccaaagagatactaaaatctttagaagaagaagggtgggagatagaaccaattcctttctataaatatggtttttgggttagacatgaaagcgaatccattggaaatacatggcaattccaaatgggctatatatattcccaagaagcagcatcgatgataccacccttggctttagatttggaagaaaacctattaatattagatatggccgctgctcctggctctaaaacaacacaaatagcaatgcatactcaaaataattcctatataatagctaacgacatttctttagatagaatctctgctttggcagaaaatgttcaaagaacaggctctttagttactattacaatgcaagatggcaggaattttaaaaaatataaaaatacttttgatagaatattattagatgcgccttgctccggggtaggagcattaagaaaatcgtacaaaaccttacaaatgtggaatcctaatatgatagagagactatctaaattgcaaagacaactaatccaagcagcattcgaagctttaaaaccaaatggtattttagtttattccacatgcacattagagcctttggaaaatgaatttgttgtaaattggctattagaaaggtacgaaaatgccaaaatagaaccaataagaatagaaaacctaaaatcgagcgaaccaatattagaatgggagaactataaatttttcgatgatattaaatatacattaagaatttacccttgggacaatgatacagaaggcttttatattgcgaaaataagaaaattggaatgatcctatacaatgatgttttcctaaaacatgattgtccccatatagaaaacaaaaatagggttttggccattaaaaaagctttaattgatttgggtataaaatattattctccccaaattgaagaagaccctataaaatatatagaaaaggcccatgataaacaatacatcgaaatgataaaatctctaattgatatggcaaaagagatgggttgtatttatatagatggtgatacttatctatctaaagatagctgggatcctattttgtatgctgtatattattcggtttatgcagtaaataatgattttttatttgctgtagtaagaccgccagggcaccatgcgggtaaatatggtaaagctaatgcaattagccaaggtttttgcatttttaacaatgcagcaattgcagctttaaactataaaggaagggtagcaatagtagatatagatttacatcatggcaatggtacagaagatatagttaagcataacaaaaacattagatattacagcatttacgctaaagacatatacccattacccgataataaaagttatgacaacatatataaatatccattacccatagatgccacaaacgaggattggatttctagttttgatttgttattggctaacctaatagaatgggaccccgataaagtaattgtaagcctcggcttcgatgcgcataaagacgatccattgtcggtatttagaacagattataccatatataaatacgctttccaaaaattggctcaatttaatcctacatatatattagaagggggttataactacgatgttttatataatggtacaaaattactaataaaatttagtcgctcctaggcgccaatatgaatattaatgtcattttatccaaatatctatactctagccataatggatagtctgtttttagctttaatatcgctatatcgcttacatctgctgcttttgcgaattttttgagataatctatagaatagctcgcatacgcttcctcttgtatgtctattgatactactgcatcttctccctctgttaactctacagtcatctccttcatttcaccttctgctttgattattaacttagatgggggttctgctttgaattttagtgaatcagctatcgctgaggcatcatctataatttcttttatagctttagaatcaagctctaccacattattgtattctaatgaaggtattggtgtttcggtttcttctccctctaataatggaatagaaaaagtcttttttattgtacctcttgccaaaatttttagcttgtttttctctctatctgtttcccaaacaaccatctctctttgttttaattttttaactatagttttcaaatcatccatacttacagttataatctctttgtctccctctatagtataatcgataaacgcctcgggtttcatttcccatataaccatagctatgctagcgggatccatagctactaatttaataccttcttctgtggcaacaaattggccttcgctaattaaatctgctacaattggaactattttctttaatgccttcgcatctggaaaggttactctcatatttagattatgcaataaagtttataaaggttttttgataaagcttatgcggccgtgcccgagcggacaaaggggccaggttgaggtcctggtggggtagtccctgccggggttcgaatccccgcggccgcactatttgttttctaaaagtttttccaactctttcgcggctttatcttttaatgctaaacccaaggcaactccaaaagctatagatagggaaacaaaaaacgctgctaccgctatggttattatttgatatattaaatctattccttgtaagtttaattgtttcaatgcagaaacaatacctataaacaatataaccaaataaccaccttcccctaacatagccaaagaggggctaccgctttcttgggctttggtttttatataataaccagctaaatagaaaatcaataaaattaatgctgcagcaatcacattgccaacaaaagataatagcatacctaatactggtatcaaagcttgtaaattaaatacccctgctgcggctgttaatatatagaaaaaggcataccacctcgctgcaatggctaatatttcacttaatttatatctacctaatgctttagatatttccaattctttcgctatatcgtctattcctaacgattctaagaatagtcttacggctttctctattatgtgtttagaaaccaaatatgcaaccactataacagacattgttactacaaaaccgattaaaacttgttttgcaaattctaaccatgggttcatcttttgctatctaataaatatttaaaagattttatttttaacaaccaaatgatatggatagttaaaactgctggaggaaaagaagaaatagttgcagatttaatagaggcaaaagctaaaaagctgggtgcgaatgtatattctatagttattgccccaggaattaaaggttatatttttgtggaggcagacaaatatgatactgtaaatgaattagtccacgatataaaacatgttagaaaagttttgcctaaacccatagaagttaaagacatagaaaaattcataaaagcagagccattggtaacaaaagtaaatgttggcgacatcgtagaagtaatagctggcccattgaagggctctagagggaaggtagtagcattcaatgaaaatacaggagaggtaacaatagaaacattagattcggtaatacctttgcctgttacagtatctattcatgatataaaattagttgagcccagcaaagaagagaagaaagaagaagtcgaagagtttttgtttttcgaatagttgcgaaagaaacttattaaaattctgcaagatttattagatatatctgatactgaattagaaatttatagttttatactaaacaactctagggtaaccgttaaagatattgtaaacaatctcaaaataagcaaaaaaactgcacatgaaaaactaaaaaaactaattagtttaggattaatagataaaaaaatcgataagaaaggttatatttacgaagcgaaggctgataaatatacaatactatcattgttaaaaaaacaattggaaaaaatatataaagagtttgaagaggaattttctaaattgtaggtctttttaaatatattctttaggtcgctctatggtttccgaaaaaacaatggcagagagagttttagccctaatgggtaggccaaacaatataagaaatatcggtattatagcgcatatacatcatggtaaaacaacactaacagacaaccttttagcaggggcaggaatgcttagcgaagagctcgctggagatgcaatgtttacttggtggcatgaacaagagagagaaagagaaatgacaatatatggagcagcagtttcaatggttcacgaatatgagggagatgattatttgattaatttaattgatactcccgggcatgtcgaatttgggggcgaagtaactagagcagtaagagctatagatggagcagttgtagtagtagatttcgtagatggtataatgccccaaactgaaactgtattaaaacaagctttaagagaatatgttaaacccgttttattcataaacaaagttgatagagcaataaaagaattgcaattacctccaaataaaataatggaaaggttagcagaaattgtagttggagtaaacgatttaattgaaagatatgccccagaggagtttaaagataaatggaaagttagtgtacaaaatgggacagttgcttttggttccgctttgcataattgggcattaagcgttccatatatgcaaaaaacaggtatagggtttaaacaaatagcagaaatttataatactgcagccgatgctaaagagataagaagaagggtatgggaaatagccccattgtatagagtagtattagatatggttgttagacatttgccttctccaaaagaagcacaaaaatatagagtgcctaaactatggcatggtgatctaaatagcaaatatggtaaagccatgctagaagcagatccaaacgggccagctgtagcagtagtaactaaagttattgtcgataaaacatctaaacaagaaactgccatagcgagggtttggtctggcacaataaggagaggtatggaagtttggctattaaatgctaacaaaaaagtaagactccaacaagttggtgtatttaagggtatacaaaaaatacaaatagaagaagcgaaagctggaaacattattgctattagtggagtaagagatttgcaaagtggtgaaaccattgtagaaccagaaccagatgggtctaaaccaaacatacccccattcgaagcaataaagcatatattcgatccagtagtaactaaagctatagaacccaaagatccaagagacttgccaaaactaatagaagtattgaaactaattcaaaaagaagatcccacattaaaagtagaaatagaccaagaaagtggacaaatactaatctctggtttaggagacttacatttggaaatagttgaatatagaataaagaacgatttcaaagtagatataataacatctaatccaatagttgtatatagagaaagcgttaaaggacaagccggcccagtagaaggtaaatctccaaacaaattaaacaaattctatattactgttgagaagatgcccgatgaattatattggaagctaagggagaaactattaaaaggcgaattgccagaaggtaaaataaagaaaatgaacgaagatataataaaacatttgatgtctttaggttttacaagggaagaagcacaaaggtgtaaggtaatctatagagaaaacatgttcttcgatatgactagaggtataatacatattggagaagtaatagatatggttatggacgcttttatgcaagttatggaccatggtccaatagcatgggaaccatgtattggattaatagtaaagctaaccgatgcacaattgcatgaggatgctatacatagggggcctggtcaagttattcctgcagtaagggaagcaattaaattagccatgaaagatgcaggccttgtattatatgaaccagtacaagtaattttggttgatgtgcccccagattacattggggatgtcacagctttaataaactctaggagaggggcaatattagatatacaaaccgaagaagatagggcattgattaaagctaaagtcccagttagagagatgataggctttacagatactctaaggtctgccacttctggaaggggagtatggtatctggtagaccaagtttatgaaccagtaccaagagaattattcgaccaaatagttagagaaataagacaaagaaaaggcttaccattagatgcagatatagtctaaggcaaaaattctcccttttcgattttttcgggcaaatatttgttcgctacaaactctaaagaatgcttagccaaagcatcttgttcagctttaatatttagttttagcattttgttgaattgtctttgccattccttgtttttaaaccatggatattccattagttcttttactctttttacatctatgggctttaattgtattgctacatctttcagatcgtattttattacatcatctatagttaaaccgataaacttagcatctggtgttgccaattgctcagaaaacattgctaaattcatagaacctcttttgattaccgaatatatatagaacccccaggggtcgccatcagtaaatacataaacaggcaaccctacttcgtatctaagttttcttattagccttctcgtccctctcgaaggttgtcccttagtagcaatcaataaagctctattcttttcgggaaacctttcctcgattaatctctcaaacatagcgtctttctcaacaactaaaacataatctgcatttacatcaactatatctatttcttctattgttgagggtattccccaacccccaaggcctagcttagagcaattccattcgtctcccctatttctgtctttcaatgttatgtctccatatagatagccttttctatctgccactataccaaattgttctcttatcgctcttaacgctctttccaaatcttcgataacagaatcgctttcgctttgttcgtcaaatgtgttttcattaatataagggattgtgtgtttcaattggtagtacacttctcttaatgaagcatgcttattagattcaaccaattctttggccaacgccgcaactaataaagtttgggtaaacctccttgtttctccaacatcaaaaaaccttcttacagattgcttctcctttaatttaattatatccttttcttcatcatactctacagttttaatattacccctagttaagaattctatccttggatcaccattttttaagaattcattatatattttttctcccaattgttttagtttttgtagtatatccattttaagtttaataaatactatttaaataatatataaatggattttgaggctatagccaaaaaattcggtctaaaaaagcggtatgtggaacatttattatattattcctatttctacaaacctgtaaactttgataaaatagaaatacctaaggaaaacttgcaatggtgggccagagagatattaaaactacaaagacctacaaaagagagattgcctttttatgaaaaaatatgggagaaacataaagaatttagcgatactataatagatatagggagtgggcttaacccaatatctttattattaatagattggagaccaaaagaatatatcgctttagatatcgcagatagtattgttaattttttaaacaaactggattttcttccaataaaggctaaaaaattcgattttcttagcgaaattccaaaagagaagggtttaatactattatggaaagtaatcccaattatggataaattctatggttttagatatgtgaaaaactatttagaatcattaagaggaaacataatttctataagttttcctagaaaaagtttgagcggtaaaaagctaattggtagggcgtggcgctattatattaaaagggcttctccctataaaattatagacgaatttgaaaccgataatgaatatttcataatattcgatgctacagaatagaccatataatatttattagcactatagttaggaaaaagctatttatttcaacccaatatttgtttaggaattcccttaatatttgggccccgtctgttataaacaatggaaccaaattagctaacccaattcctatatttactatgcccaataccgatattagcgaatacaagaaataaaagccctttttaatataatacggtattacccatactcctaaaaatggtttcccatttttctcttttaatttcgtcactatttcccctttgtcagtatttactataactctatcgccaggtttatgcttatatataatatctcttatgttttttattgtaacatttgtattgtctatactatagatgcattttactccttctaaatctggattagtagtttttaccaattttaaacatttgtattgatggaaatacggaaatagaatattggataaacctaaaaaaattaatcctaatattatattaactgcgggcccagcagagagaaccataattctatttattggtttgtcctttttgaattcttcttcatctggttcaacaaatgctgctaaaatagggcccagcaaagctaaaccccaactttttatttttctattcagagaaactaacatttgtgcatgggccaattcatgaactaatgcggctatagaaatagcaattatgccttcaattaatggtaacttcaatccccctatttctataccgggaattaatggggtaacaacaggagtaaaattattgggtctaaaaataaaatcgtatagcgattttaataaaaaagcaattgtaaaacctatccctgcaaaagctataactgtataaatgaagcccaatactttataatgcttagttttcaatttatatagaatagagggatctagctttatcattattaggggaaaccttacctctatcatcgaccgcaataaaaatatatttataaaaactttcttttcgttatacgatggtatctgtagaccaagtaaaaaaagctagagagggcaaaaaaagaaggtttacccaaacattcgaactaatattcaacctaaaaaatgtagatttaaggaaatataggctttcaacctatatagttttacctagagggaggggcaaaaagatgccaattctcgctatcgtgggcccagaaaataaagaattggcagaaaaatattttgacatagtattaactagagaagatctaaaacaattagataaaaggacagctaaaaaattagctaaaaggcattaccatgtcgtagcgcaagcagatttaatgccagaattaggtaaatctttgttaggtagattcctaggaattaggggaaagatgccaaacccaaaagcaggccaaatattgcctccaaatttgaatgaaaaaatgttagaggcattaagagaaaagctaaacaatactgtaagagttaatgttaaaaagcatgttacctttggagtaccaataggcacagaagatatggaagatgaagctatagcagagaatgcagatactgttattaatgaaataatatcccaattacctcaaggcaaacaaaatatagatagtgtgtatctaaaactaactatggggccagcggttagagttttataaatagtttttggtattaattcgtatggctaaatattctattataatggaaaagaaaaacaaactattcgatagaacagaatatattatacaagtggagcatccaaaggaaaaaaccccaactagggaggaggcaaaagaaaaaatagcagagatgcttaatgtcgacaaaaataaattagttattaaaaagattgtatctaaatatggcttaccctatagctttatatacgctagggtttatgataacatcgataccgcaaaaagagtagagctaaaacaaattttaagaaggaataacttacaataaatctttttgtattagctctataactttttctatttcaaagcccttttcttccataattttgaaaacccttcttaacaatattctaatattataacctccccccgtattagatgggagcattccatcttttatcgctaaataaacacttctcaaatggtctgctactatatacattttagcatattcttcccaggcttttaatacatagtccaaatcgaatccaaagttttcggcatattcttttgccacattaattatatcgtccttactttctattttatatcccaaataataaatatctttgatttccctatctaaatcgaaataatttctcaaatatttcaaactatttggaaaagtaacttcataagcgtttatagaaccatttagagcccaaactattctttcatgacccgcacccatatctaaaactcttatattctccataggaattagtttattatctattactttgtaaaccatatatacttggttggccaactctaaaccggtatagaatatctctaatgaagggcccgcattacctccgccagcccaagcatcttcatgtataaccaattggttatccttgaaacctaaataattaaaataatctaacaaatctcttaaatatttgtaaggattataattttcgggtttttcaaaagcatgttggccaatcattataaagctagtaaaatgtctcccactatagccaaccaagggtaaatcatcaaaccttaaacagtattgggggattattattctatttgctataggctctatttctccattaactatgtggggttggaaatcaactatagaggcaataacaaaatctaaatcatctctccatctcgctacgacaggataactatttaatggaacataccctctttcgctgaaaaattttttagttaaatcccatagttttttatattctatcggttttattggtttgcctataaaagaatatggctcatggtctgcacatgtttctctattctctatagaccaaaaataccttttacatattttgcattgttttcttttgaaacccctttcatttagagcagcaataggataaaccttttcaggatttttagaagcaatatttattatttgctctttaaccatttaaatttttgtctgtattattaaaaaattcgagctttttgttattatatacagggcagaaatatttataatcgcagtattggcaatattttttattagcgatcatccttgggctgtctaagaaaagtttgactttttcatataattctaaaaataactctttatatggatctaactctacttctatatatctatcggtttttgtgtaatacaataagccaacatctattttagtattatagtttttttctaacaatatggcatagcccgccaattggattttatgatattctttataagtgccagtttttatttctattggtattagcctaccacttttgtatttttcaagcctatctattcttccaactaaatcgttatattttagcaaaatctcactttttataattggattaattttgttgtaaaattgttctccgtatttttctataaaagaccaaacatagtttgctctaaatttggcttctctatggattatgtcttttagttctaaaatataagtttggggagcattaaattctaaaatagccctaaccaaacccctattcgccattattatatagtcttttgtaaatctttctaattctataggtaattccaaatcgtttaaatattctttttcaaaagaatcgaacaattcaaaagctctatgcaatattttgccccttaataatcgcttgttctctatttttatattctttattttctttaaatataacctaacagggcaaatcaaatattctattatatcagtaacgaatatcattgcttgcaaattaatgttatttttaaatatggtttaatatttagattgccgccgtgcccgagcggcccaagggggagggctcgagaccctctccccgccaagggggcgggggttcgaatccccccggcggcgttattggataaacaaccacttttccgctttaacaacaaaatctgcagaaattgttatttttacactatctttagaagttttgattatatatgtgttttgttctccaacaactttttgtactgttatacttggatcattaggattaatttttatgtttttcaattcagctagcccatttacagttattttaataccattaggaataatggttgcatcctgtatatagataatacctttctttagatcataacttagttttttgttttgcctatctattataaatgtaaattccctatttgctttcccttctactattgcaactataggaaatttaaatggaaaatcaaaagcgatatcggataaactaactttataattaaccttatcttctttagtactagttataacgttaagagagtcggatatataataaaaggggttaaccaattttattgtataactagttgcatattcaggttttttgaattgggctagaacatacaaaatagattgcttaaaccctgctaataattctagcataaaaactaatatataaaatttttaaagctctacaacaatatactcggccggggcagtgggaggaaaatccccgtgacccgggttcaaatcccggcgggggcatttatgatttgatctattatctttattattatcgatgtttatatatttttgaattatttaagatacctcttcatccaatttttacctagctctatttcgagaacataactattgcatagcttttaatacatggataaaatatctatttgaggagtagtttggaatttctaatatattagaaatcctataaattgtgggaatgagtaaactctcaatatcttttattacaaaaaattacaaataatttgaattacttaatctctctaatagtttgttttatgactggaatgcggtttgtttccttctaattcctacctataagctattttatattagaacttttggataacgaaagcttaaataaatatagggaggcccccggagtagcccactcccaggtgggtgggggcgatgacacgggggcgctattttctttatatttacaattagctttcttaaaatgttcactatgctattattttcaaggatttaagcatttagtgttaatgtactagaaaccttgcataaggttgttatacaaaaagttaacatttttaatatgttaacttaataaaataaacacggcacccaacaacaacgggggcgaggttcggttcccgatgatccccgtgaggatgagggagccgtgagcggtcacttcttttttatgatttttctaattatttcaattcttcttgttggatttctaaataaatctcttattcttctaaataagttggccaagttatctgcaactaggtcaatcttttaatgttgggatctctaacttttccctcttttattatatctacattgaagaagatctgcttaaatttatgaaaaatgttatcatctacaactatcaattggctttcattttttatcaactcttcatactcggctagcaatttatctaagtttgtagaataatctacgaccctaaaaatgctattatcaaacttttcagcaaattttttaaggtagtctctctttttccagtcttcttttatttcttttatatgctttaatgtgggaaacttttgttttaatagagatagcttgcttttttctattgatatgattgcataaactcctctttcgaaatattttctttgattgattgggatggtagaaaaattggtttttgatcaatctattgcggttattggggttaagtctttgttattttgtttcttgcttattctgttgttttttcccattccttaagctatctttgtgggattttaataaaacgtgtggtagagacctattaaaataactaatataacaaataaaatgagtcaaaatcgcaagggatataatatttctaatatattagaaactcttgccccctatttcatcgcccccccattgagggagcccgctccggggggttatattattactcaataatctccaatatatttttaaatctttatgccttatcaaaaagttttttataaatatattatcatataatattttatgataacccacttccaacatttctaatatactaatattctagaaacagtatttttgtgtctcgtccaggaataaccatgtttcatctttcaatatttctaatatattagaaacactacagtgtaatttggtcagcaggcgtcggttggctataactttcaatatttctaatatattagaaactagcgacaatatcttcttctctcgtgtatctcgggaatctttcaatatttctaatatattagaaactatagaccgccattgcgtatatgcttaattccttatccgcctttcaatatttctaatatattagaaacgagaaacaattaagctattatcaataacattcacagcaacctttcaatatttctaatatattagaaactggaggacaacgaaaggtttttaaaggaacagggcgagaatgtggactttcaatatttctaatatattagaaacgtggttgggagggagccgaagggtccgaagggttcgaatctttcaatatttctaatatattagaaacatgttgtgttctattgccacggatgtatctgctattatgtctttcaatatttctaatatattagaaacttgataaattctttgaagttatatgtaattatcactctatctttcaatatttctaatatattagaaacattttcaaagactctaaaaatctgggggaaatgaaattggctttcaatatttctaatatattagaaactatatgaattgtctaggtacttttgtgtctcatccaaaaataaccatgtttcgttcgaatttctgtctttcaatatttctaatatattagaaaccacatttatgtatattatataatactttaaaagtctaacagctttcaatatttctaatatattagaaacgatcacatacaggaattgctgaagaaattgttacaggaaaagctttcaatatttctaatatattagaaacatgataagatgtttgctcaaaaagccaaatgcttttacacactttcaatatttctaatatattagaaaccatcatatttaaagagtttgagaacacgatacatttctttcaatatttctaatatattagaaacgtgggtcaatttaaaggatatttcacaaatgtagagttagaaactttcaatatttctaatatattagaaacatcctatcaattctggaatctgatgctggatcaaatataactttcaatatttctaatatattagaaacttcaggacaagaacaatgtaaaataactcaatttaacatactttcaatatttctaatatattagaaactcattcttagataaacaagatatagtatttagaaagatgctttcaatatttctaatatattagaaacatggcggaacattacaattgaagatagataataagagtaactttcaatatttctaatatattagaaacatcatttcttgttgtctctgaagccaaagaatctgtagagctttcaatatttctaatatattagaaaccagtcttaactataatgcatgttatttgcctaactgataactttcaatatttctaatatattagaaacattgcagtttatactgaagatccttcttaattctagttactttcaatatttctaatatattagaaacacagctaaacatttataaataattatattattattatccatactttcaatatttctaatatattagaaacttacattatccctaattactattcttactatcgaattgtactttcaatatttctaatatattagaaactgttacaaatgtgtatactaccaatatcaatgcaaatcaactttcaatatttctaatatattagaaactgttaatgattatatgctgagttgttaataatgttgtcctctttcaatatttctaatatattagaaacttaatcccgttcaaagtagcacttgaatccaatagtgaactctttctttcaatatttctaatatattagaaacccacagggctattcgagccttttcccttatatttacaattacgaaccttattatttaaaaaccttctgcgaggttttatagtaaaaatatttaaaaacccctgcagaaagctatttgttatttttgtttatacaaattcggtttttcaattgaattaaattaaaaccctaccaatatttaacaattaacaatagaatcacataggattttgtaaataaaaataaaatccgtaatagtacattgaatcaaaacaaaaacgctcaaaataataaataacaaaagcgatagaggaaagtgtaagagatttcaaaaatagctaaaaggcgttttcaaaaatgtaaaacctta

SEQ ID NO: 2 - DNA, 879 bp, Nanoarcheum equitans
atgcgattgctattagaacttaaagccctaaatagcatagataaaaaacaattatctaactatctaatacaaggtttcatttataatatattaaaaaataccgaatactcttggttacataattggaagaaagagaaatattttaattttaccttaatcccaaaaaaagacataatagagaataagaggtattatttaatcatatcttcgcccgataaaaggtttatagaggttttgcataataaaataaaagatttagatataataactattggtttggctcaattccaattaaggaaaacaaaaaaattcgatccaaaattaagatttccttgggttactataactcctatagtattaagggaaggcaaaatagtaatattaaaaggggacaaatactataaggtatttgttaagcgattggaagaattgaaaaagtataatctaataaaaaagaaagagcccattttagaagaacccatagagattagtttaaaccaaatcaaagatggatggaaaattatagatgtaaaagataggtattacgattttagaaataagagttttagcgctttttctaattggttgcgagacctaaaagagcaaagcttaagaaaatataataatttctgtgggaagaacttttattttgaagaagcaatattcgaaggttttactttctataaaacagtatcaataagaataagaattaacagaggggaagcagtatatataggcacattatggaaagagttaaatgtttatagaaaattagacaaagaagaaagagaattttacaaatttttgtacgattgcggtttgggttcattaaattctatgggttttgggtttgttaatacaaaaaagaactctgcgaga

SEQ ID NO: 3 - protein, 293 aa, Nanoarcheum equitans
MRLLLELKALNSIDKKQLSNYLIQGFIYNILKNTEYSWLHNWKKEKYFNFTLIPKKDIIENKRYYLIISSPDKRFIEVLHNKIKDLDIITIGLAQFQLRKTKKFDPKLRFPWVTITPIVLREGKIVILKGDKYYKVFVKRLEELKKYNLIKKKEPILEEPIEISLNQIKDGWKIIDVKDRYYDFRNKSFSAFSNWLRDLKEQSLRKYNNFCGKNFYFEEAIFEGFTFYKTVSIRIRINRGEAVYIGTLWKELNVYRKLDKEEREFYKFLYDCGLGSLNSMGFGFVNTKKNSAR

SEQ ID NO: 4 - DNA, 1809 bp, Nanoarcheum equitans
atgaaaaagccccaaccctataaagatgaagagatatattctattttagaagagcccgtaaaacaatggtttaaagagaaatacaaaacattcactcccccacaaaggtatgcaataatggaaatacataaaaggaacaatgttttaatttcttcccccacaggttcgggaaaaacgttagcagcgtttttagctataataaatgaattaataaagttatctcataaaggaaaattagaaaatagagtttatgccatttatgtttctccattaagaagtttaaataacgatgtaaagaaaaacttagaaactccattaaaagaaataaaagaaaaagcgaaagagcttaactattatattggagatattagaatcgctgtaagaactagtgatacaaaagaatcggaaaaagcaaaaatgcttaagcaacctccacatattttgattaccactcctgaatctttagctataatattatcaacaaaaaaatttagagaacatataaagaaagtggaatttgttgttgtggatgaaatacatgctttagcagagtctaaaaggggaacacatttagctttaagcttagagagattaaactatctaaccaatttcgttagaattgggctttcagcaacaatccatccattagaggaagtggcaaaatttttgtttggttatgaaaatgggaaaccaagggaaggctatataatagatgtttctttcgaaaaacctatagaaatacaagtatatagccctgtggacgatataatatatagctctcaagaagagttaatgcggaacctatacaaatttattggagagcaattgaaaaaatatagaactatattaatatttaccaataccagacatggtgcagaaagtgtggcataccatttgaaaaaagcttttcccgatttagaaaaatatattgcggtgcaccattcctctttgtctagagaagaaagattagagatagaagaaaaactaaaaaggggcgaattaagaatagtatgcacttctacttctttagaactaggaatagatataggtacaatagatttagttatacaaataggttctcctaagagtgttaatagggcattacaaagaattggtagggctggccatagattagatgaaaagagcaaaggtattctaattggcttagatagagacgaactattggaaaacacaataataaaatatagcgccgacaatagaaggttagacagaattcatattccaactaatgctttagatgtattggcccaacatatagtagggatgggcttagagaaagaatgggatctaaaggaagcatacaatttaataagaaatgcttatccctatagaaatctatcgtgggacgattatattaatactataaaatatttggctggagagtatacaaaattagaacataaaaaagtatatgctaaaataattttgagggacaataaatttaaaactaagggtagtgtaagagctatttattttatgaatataggcactatccccgaagaaacaaaaatagcggtatatactttagataataaaagaataggttatgtagaggaagaatttgtagaaaaactagtaaaaggggacatattcgttttggcaggaaaaacttatgaatttctatatagtaagggcaataaaatatatgttagacctgtaaaaggggtaaaccccacaataccccattggttttctgagatgttaccattaagttatgatttagcgatagaaatacaaaaatttagagaggaaatagccaaaaaattagagagagaacctttggactaa

SEQ ID NO: 5 - protein, 602 aa, Nanoarcheum equitans
MKKPQPYKDEEIYSILEEPVKQWFKEKYKTFTPPQRYAIMEIHKRNNVLISSPTGSGKTLAAFLAIINELIKLSHKGKLENRVYAIYVSPLRSLNNDVKKNLETPLKEIKEKAKELNYYIGDIRIAVRTSDTKESEKAKMLKQPPHILITTPESLAIILSTKKFREHIKKVEFVVVDEIHALAESKRGTHLALSLERLNYLTNFVRIGLSATIHPLEEVAKFLFGYENGKPREGYIIDVSFEKPIEIQVYSPVDDIIYSSQEELMRNLYKFIGEQLKKYRTILIFTNTRHGAESVAYHLKKAFPDLEKYIAVHHSSLSREERLEIEEKLKRGELRIVCTSTSLELGIDIGTIDLVIQIGSPKSVNRALQRIGRAGHRLDEKSKGILIGLDRDELLENTIIKYSADNRRLDRIHIPTNALDVLAQHIVGMGLEKEWDLKEAYNLIRNAYPYRNLSWDDYINTIKYLAGEYTKLEHKKVYAKIILRDNKFKTKGSVRAIYFMNIGTIPEETKIAVYTLDNKRIGYVEEEFVEKLVKGDIFVLAGKTYEFLYSKGNKIYVRPVKGVNPTIPHWFSEMLPLSYDLAIEIQKFREEIAKKLEREPLD

SEQ ID NO: 6 - DNA, 522 bp, Nanoarcheum equitans
atgttaaaagagggcgattatatagaggggaaaataaaaatttacgaaggagaaaagcttttgttagaggataagattttaacaaagctgggctctgggttatataataaagaaattgagaataatttgattggcaaagaaggagaaaaaatagaattagaattcgatgaaaataataatcctttcggaaaaagaaatccgaaaaatatagtgatagtgcctgcaaaagtttttagagaaaatagattaataccaattcctgggttagtagttaatatggatggcaaaaccggaatagttttaactgttaatagtgatagagttttagtggattttaaccatccattggcagggaaaaaaataaaaattattatagaggatataaagaaattggatagaaaagaatttttagaaaaattggctcaaaaccttggttataaagatgttattgaagaaaaggatggccaactaataataaaaagcaaaatcttagaaagtttagtccaaaggttctctctctaa

SEQ ID NO: 7 - protein, 173 aa, Nanoarcheum equitans
MLKEGDYIEGKIKIYEGEKLLLEDKILTKLGSGLYNKEIENNLIGKEGEKIELEFDENNNPFGKRNPKNIVIVPAKVFRENRLIPIPGLVVNMDGKTGIVLTVNSDRVLVDFNHPLAGKKIKIIIEDIKKLDRKEFLEKLAQNLGYKDVIEEKDGQLIIKSKILESLVQRFSL

SEQ ID NO: 8 - DNA, 459 bp, Nanoarcheum equitans
atgatttgcattagggattattgttttgaatatttagaccataccgctgatgtaatgataaaagcatatggtaggaatttgaaacatgcattttactctgccgcagctgggatgttacatctaatatatgatgtagataaagtagaaagcgatagcgaaaaaatagaaatagaaagctatggcgattacgctagcgaagttttatatgattggttatctaatatattggcccaattctatataaaaaagatagcttttggattttttaaaataaaaaatttgagaagaataaagaatggcaaaaagcaatggtatttaaaaggatatgctatgggggagccttattctatggagaagcataattttaaaaaagaagtaaaagctgtaacatggcatggtttagatattaaaagggaagggagggcgaaatatgttatagaatttattgtagacatatag

SEQ ID NO: 9 - protein, 152 aa, Nanoarcheum equitans
MICIRDYCFEYLDHTADVMIKAYGRNLKHAFYSAAAGMLHLIYDVDKVESDSEKIEIESYGDYASEVLYDWLSNILAQFYIKKIAFGFFKIKNLRRIKNGKKQWYLKGYAMGEPYSMEKHNFKKEVKAVTWHGLDIKREGRAKYVIEFIVDI

SEQ ID NO: 10 - DNA, 921 bp, Nanoarcheum equitans
atgctctataaatatttgttagaatggcttaaagagcacaatatatattttttgcatttaaatagaagaaaacttaggtcttatttaaatccattccaatcggtgttattagaaatattgcttaatgattatagaatagatttcaaaaaagagggaggcatccctttatacaaagagggggaattctatctattaaataggaaaggcccttactatagtgatgctattttatccaaacaaggggtaaaaccagaattaaatttgcccaaatacccattatttataatagatttgcgttactataataggcataccgaaaaagaaaagcgcagaataataaaagagatactagccagtttaatagaagtaagaaaatatctatgggataggcatttagctttagtagctaatagagagttatttaattttatttcccataaattggggaacaataaaattttaagattagactatccattaaatggcatcgctttagatccaaatgccgatgaaatattaactgaaaaggacataaaagagaacaatatatttctaattgggggtatagtagatttgggacaaaatagaccatggactaaagaattgtttaaagaatttcctagaaaaagaatcgaattctatggcaaaaccaaaggggtaccagataggtttaacagaataatatcaatattattaaaagtcaaattcgaaaacaaaactattgaagaggcaataaaagagaacctaactaggaaagacatattagagagattatctatcgaattgccaaagcgctgggttaaattagataacaaattcgttttaccaaaaaaagaatatgaagagctaaataaaatgtttggtcgggatattaaaccctatctaaaagtgtttaaagtagaagtcatagaaaagcaatga

SEQ ID NO: 11 - protein, 306 aa, Nanoarcheum equitans
MLYKYLLEWLKEHNIYFLHLNRRKLRSYLNPFQSVLLEILLNDYRIDFKKEGGIPLYKEGEFYLLNRKGPYYSDAILSKQGVKPELNLPKYPLFIIDLRYYNRHTEKEKRRIIKEILASLIEVRKYLWDRHLALVANRELFNFISHKLGNNKILRLDYPLNGIALDPNADEILTEKDIKENNIFLIGGIVDLGQNRPWTKELFKEFPRKRIEFYGKTKGVPDRFNRIISILLKVKFENKTIEEAIKENLTRKDILERLSIELPKRWVKLDNKFVLPKKEYEELNKMFGRDIKPYLKVFKVEVIEKQ

SEQ ID NO: 12 - DNA, 411 bp, Nanoarcheum equitans
atgcaatataaagttttttgctactataggccattcctagctataattaagaataacaaaattgtagaagtgaaaactacaaataaaaaatgcgagatctctttggataaactattagagatgtatgaacccaatttgtattatccttataatttattgtatgaatatatgaaagagaaaaggctatatttttacaaagagctagctaacttattaaaaatgcatcctagaaaaataggcctaatactgaaaaagaatcctttgcctataataataccttgccatagagttattaaatctaactataatattgggggttacaaatttggaatagaattgaaaaaatatctattgattcaagaaaaactttgtagcgaaataaaaaatggctattgcaaacccaaagcctag

SEQ ID NO: 13 - protein, 136 aa, Nanoarcheum equitans
MQYKVFCYYRPFLAIIKNNKIVEVKTTNKKCEISLDKLLEMYEPNLYYPYNLLYEYMKEKRLYFYKELANLLKMHPRKIGLILKKNPLPIIIPCHRVIKSNYNIGGYKFGIELKKYLLIQEKLCSEIKNGYCKPKA

SEQ ID NO: 14 - DNA, 555 bp, Nanoarcheum equitans
atggagaaaatattcttgggcatggaaatacaaaaggaagcagtagcgatagtttttataattttttccctaattctttttatatacaatagctttttcgctttattatttccatttattttattaaactattatttattatccaaatcaaaagatatagatgattttgtagtaattaatatggttatgcttttttctattttgttggtttaccatttaatatttgatagcctaacaaaagggcaatgggatttgcaagggtttttttattatatagacgaatatgaatcgcatatttttatgctaatacctttgttaataatatttccattcataaatataaacaaagataacctattgctaaactcttttttaattggtttgggtttatttttatcgatagaaggaaaaatatttccctttgtaattatttctttgatgtttatttacccatttgttaacaaggataagaaagaactaatattgctaaccctaggctttgggtttgcaatagccattttttatttcgctacaaagtttttcttgaatcaatag

SEQ ID NO: 15 - protein, 184 aa, Nanoarcheum equitans
MEKIFLGMEIQKEAVAIVFIIFSLILFIYNSFFALLFPFILLNYYLLSKSKDIDDFVVINMVMLFSILLVYHLIFDSLTKGQWDLQGFFYYIDEYESHIFMLIPLLIIFPFININKDNLLLNSFLIGLGLFLSIEGKIFPFVIISLMFIYPFVNKDKKELILLTLGFGFAIAIFYFATKFFLNQ

SEQ ID NO: 16 - DNA, 1242 bp, Nanoarcheum equitans
gtgaaagtctatttcgaaagctatggttgcacactaaataagagagacactttatatatgcaagcacaaatagaaaatactacaaacaatttagaagaagcggatgttgttgttataaatagttgtatagtaaaacaaccaaccgaaactaaaatattgtatagaataaaccaactaaagaagatgggcaaaaaaattgttttaactggttgtatggttagtgaaccatatttaaaatacaaagaattacaggacatatctttagtaaacatatacaaccaagatagaattaaagaagcaatagagagaacatacaaaggagaaagagttttgtttttagaaaagaaaaaaatatacaaagaatttgctaggcctttatctaaagctagggcaataatacaaatccaagaaggttgtttatggagatgcacttattgcggtacaaagctagcgagatcgatgttttattcttatccaccaaagttaataaaaagagaaatagaggaaaaactcaaacaaggaataaaaatattttatttaacgggccctgatactgccacttatggaaaagacattaactatagcttggcggatttgctaaaagatttaatagaaatagaaggcgatttttatataagagtgggtatggctaacccaacatttttcttagagcaaatagatgaactaatagatgtgtttaaatcaaacaaaatatttaagttcttccatttaccagtacaaagtgggtctaataaagtgctaaaagatatgaataggccctatactatagaggaatataaagagcttatttataagctaagaaaacattttcctttagctacttacgttacagatataattgtaggctatccaactgaaacggaagaagattttgaacaaacattagaattggttagggaaataaaatttgatggcataaacataagcagattttggaggaggcccggaacaatagcttggaatttgaaacaattggatccagaaatagttactaatagagtaaaaaggttgaaagaagtattcttacaaggagcgtatgaaagaaataagctatggctaaactgggaaggcgaagctataattgaagaaaaaggcaaaaacaatacatggattgccaaaaacgaaatgtataaacaaataatagtgaaaggcaattatgaagaagggcaaaaaattaaggtaaaaataaaaaaagctagagctattgatttaatcgcctag

SEQ ID NO: 17 - protein, 413 aa, Nanoarcheum equitans
MKVYFESYGCTLNKRDTLYMQAQIENTTNNLEEADVVVINSCIVKQPTETKILYRINQLKKMGKKIVLTGCMVSEPYLKYKELQDISLVNIYNQDRIKEAIERTYKGERVLFLEKKKIYKEFARPLSKARAIIQIQEGCLWRCTYCGTKLARSMFYSYPPKLIKREIEEKLKQGIKIFYLTGPDTATYGKDINYSLADLLKDLIEIEGDFYIRVGMANPTFFLEQIDELIDVFKSNKIFKFFHLPVQSGSNKVLKDMNRPYTIEEYKELIYKLRKHFPLATYVTDIIVGYPTETEEDFEQTLELVREIKFDGINISRFWRRPGTIAWNLKQLDPEIVTNRVKRLKEVFLQGAYERNKLWLNWEGEAIIEEKGKNNTWIAKNEMYKQIIVKGNYEEGQKIKVKIKKARAIDLIA

SEQ ID NO: 18 - DNA, 297 bp, Nanoarcheum equitans
atgaaagagatagaacaagttatagaagagtttaatagattgcataaagccaattgcaaattattagaaataaaggacgacactataatagtgctattttcagggcatatctgttttacttgtgggacttatgattattttgaggatttagccgttttattatcggaaaaactaaacaaacaatatggagtagaaaaatatgaacaattaaatggggactatattgtatattataagccgaaagagaaaataaagcaaaccaaaagagatattaaagtaatatttttccaaatataa

SEQ ID NO: 19 - protein, 98 aa, Nanoarcheum equitans
MKEIEQVIEEFNRLHKANCKLLEIKDDTIIVLFSGHICFTCGTYDYFEDLAVLLSEKLNKQYGVEKYEQLNGDYIVYYKPKEKIKQTKRDIKVIFFQI

SEQ ID NO: 20 - DNA, 1026 bp, Nanoarcheum equitans
atggaaaaccgagaaggaattatagagtttgtaaaagaagcatatccaataactaaaggcaaatatcgaatacctttagcagttactgaattttttatagagaaggaaaaactaaaagagatagaggaaaagctaaatgccatatttttaagaataaaggaaatagtatttgagtttttggataatagtttaaagggctatcctatagacgagtttagaaaaaatttatatctaaaaatttatgagaactacaattacaaatttaagggaataattagatttgatatgattaattttaagctcatagaaattaacgctgatgctgtggaaggagtaatacaattagatattacatctaaatggttttctgagctttttgattttgttggcgaacctcgatataatagagagccatttttaagtttattcgataaacctgcgattatagtttatcccgataattatttgttcgttgacgaatactatttggaaagcaaattattaaaaggcccatatattaaggaaagcgagttctatgagaacaaaaagtatagaatttatccaatatatagaagggccatagatatagataaagttaaaaaactagattattggttagaaaaacaaaatattaacgatatactatttacaataatgggaaacaaagctaacttggcctttttagataaagaggtagattgggctttagatattgtagcaaaaacctcttttaaaccagaattcaaaaaatatgtgtgtaaaccatattttggcacacatggagaagtctatttcgaaaaaagagataactgtgtataccaagagtttatagaaataccaaaaagagagatttcatatttagatatagatgataaaatcaaaaaaggtatattttattatgattttaacccttatgcgtttttcgacaaaaaattaaggtttggcaatattttattaagattttccaaagatcatatattgaatgtggcaaaaggaggaggagtaggcttttatactatagtatga

SEQ ID NO: 21 - protein, 341 aa, Nanoarcheum equitans
MENREGIIEFVKEAYPITKGKYRIPLAVTEFFIEKEKLKEIEEKLNAIFLRIKEIVFEFLDNSLKGYPIDEFRKNLYLKIYENYNYKFKGIIRFDMINFKLIEINADAVEGVIQLDITSKWFSELFDFVGEPRYNREPFLSLFDKPAIIVYPDNYLFVDEYYLESKLLKGPYIKESEFYENKKYRIYPIYRRAIDIDKVKKLDYWLEKQNINDILFTIMGNKANLAFLDKEVDWALDIVAKTSFKPEFKKYVCKPYFGTHGEVYFEKRDNCVYQEFIEIPKREISYLDIDDKIKKGIFYYDFNPYAFFDKKLRFGNILLRFSKDHILNVAKGGGVGFYTIV

SEQ ID NO: 22 - DNA, 330 bp, Nanoarcheum equitans
atgatcaaaaccgaatacaatccaaaacattcccctataatagagatagaaaaagagggcgaattatataaaattacaatagaagttggcaaagaagtgaaacatcccaatgagccttcccaccatatacaatgggtagacttatatttcgaaccagagggaaaagagccaacccatatagcgagaatagaatttaaagcgcatggagaatacaataattataccgaaccaaaagcgatagtttatgctaaactagaagggaaaggtaaactaattgctataagctattgtactttacatgggttatggaaaaccgagaaggaattatag

SEQ ID NO: 23 - protein, 109 aa, Nanoarcheum equitans
MIKTEYNPKHSPIIEIEKEGELYKITIEVGKEVKHPNEPSHHIQWVDLYFEPEGKEPTHIARIEFKAHGEYNNYTEPKAIVYAKLEGKGKLIAISYCTLHGLWKTEKEL

SEQ ID NO: 24 - DNA, 1041 bp, Nanoarcheum equitans
atgaaaaaaattgcggtttttgttccccattctatatacccaaattttggtggggcggttagatgttatgagttattaaaaagacttgacaagcgattccgtttaataatattctccttatcagaaaaatttgaaataaaacgaatatgggataactccattttaattgagtaccctaaaggaatattgcctactataatgttttttcgtattgttaaacaatttaatcccgatttggttatagttgagtatacatctatctattctttcttcccaaccatcattggtaagttatatgggaaacctgttatattggatgcgcacaatgtagaatatgtatttaaaaggggtaggctaccctcctttttattacctttgtttttcttgaatgaactattattgtctaagttgtctgacatattattagtagtatctaaacttgataaaaagatatttgaacttttatataacatagataggattgttgttatacccaatggtgtaaaccccgacaggttttctaataatgaaacaaaaagtaattgtgccgtatttcatggagattacaattatgatgccaatagggaagctataaactttatattagatctggcaaaggaattaccagaaatagaatttgtaatctttggtagagatacgaataaagtaaaaccaaaatctaaaaatgtaaaagtgttaggagaagttgcatatgaagagataccaagaattttacaaaaatgtaaaattgcagtagtccctctatttagagggtctggcactagtttaaaaatcctagaatacctttcagcaggtttaacgattgttgctaccaaaatagctgtccgaggtttgcctttaaaagaaggtacacattactataaagctgaaacagaagaagaatttgtagaaaaaataaaatatgcattagaacacccaactaagcaatatagtgttatagaattttcctgggacaatataagtaaaaaactaataaaaactatagaaaaagtaataaatgtccgtactaaacaagattaa

SEQ ID NO: 25 - protein, 346 aa, Nanoarcheum equitans
MKKIAVFVPHSIYPNFGGAVRCYELLKRLDKRFRLIIFSLSEKFEIKRIWDNSILIEYPKGILPTIMFFRIVKQFNPDLVIVEYTSIYSFFPTIIGKLYGKPVILDAHNVEYVFKRGRLPSFLLPLFFLNELLLSKLSDILLVVSKLDKKIFELLYNIDRIVVIPNGVNPDRFSNNETKSNCAVFHGDYNYDANREAINFILDLAKELPEIEFVIFGRDTNKVKPKSKNVKVLGEVAYEEIPRILQKCKIAVVPLFRGSGTSLKILEYLSAGLTIVATKIAVRGLPLKEGTHYYKAETEEEFVEKIKYALEHPTKQYSVIEFSWDNISKKLIKTIEKVINVRTKQD

SEQ ID NO: 26 - DNA, 1041 bp, Nanoarcheum equitans
atgtccgtactaaacaagattaaaacagtattaactacccctataagagatatcgaaggaagactaaaaaaaggttattattttttgagcctagagatatccttaacctatttgtgtaattcgcgttgtaccttttgcaatatatggaaaatttataaggaaaaccccaatttattgaaaaaagaactttctaaagaggagtggattgattttctatcaaaaaataataaatatctagcatgggtctctcttacagggggagaacccttactaaaagatggggcaatagatattattaactatttgctgaacaatggcaaaaatgttgaaataacgactaatgcaatagcatacaaatatataataggaaacctagaaaaaataaaaaataaaaagaaattgtttgttggtgtgtctcttgatggacccaaggaaatacatgataagcttagaggagttccgggaaattttgacaatgccataaagctattggaatggttagaacaaaacaattttaattttggaatctctgtaacaatttcataccaaaatgctccatatatcatggaattgtttgaatttttagaaaaaaggggctggattgataaagtatcctttagagtagctactatatcccaatattatagaaatgagcaaaaaatagttataacaaaagagcatatacagtctataaaagaggcattattaaaaatttacaaaggatatcctcgttttaggaaggacaaattctatttcggaaatctattatttttagaaggtaagatagattttgattgcgtagcgggtagaaatttcttatttatagatccatatggcaatgtttatccttgtctctatagattggataaaaaattgggaaacataaaagagaatccaaatttgttaaattacttagggaaattcaaaagggattgcaaatgttggagtgaatgccattacctaccggctaggaggagtagtacaaaggagctattatcatatatttggtttcgacttttttctaacaaaaaacatctctaa

SEQ ID NO: 27 - protein, 346 aa, Nanoarcheum equitans
MSVLNKIKTVLTTPIRDIEGRLKKGYYFLSLEISLTYLCNSRCTFCNIWKIYKENPNLLKKELSKEEWIDFLSKNNKYLAWVSLTGGEPLLKDGAIDIINYLLNNGKNVEITTNAIAYKYIIGNLEKIKNKKKLFVGVSLDGPKEIHDKLRGVPGNFDNAIKLLEWLEQNNFNFGISVTISYQNAPYIMELFEFLEKRGWIDKVSFRVATISQYYRNEQKIVITKEHIQSIKEALLKIYKGYPRFRKDKFYFGNLLFLEGKIDFDCVAGRNFLFIDPYGNVYPCLYRLDKKLGNIKENPNLLNYLGKFKRDCKCWSECHYLPARRSSTKELLSYIWFRLFSNKKHL

SEQ ID NO: 28 - DNA, 948 bp, Nanoarcheum equitans
atgacatgcagaattagatatttccaacctgggttttttgctatccctgttgggattggaggtttatcaatagcttatttaagattggcagaactatttccctatctaaaatcgataggcttaggattagcttggctttcctttatttctttaatagtaatagccatattatatttggcaaaaattgtatttttcaaacaagagtttttgaaagacataaataatccaataaaattatcgatgttgcctttattttctatagctttactaatagattctatatcttttggaatattaaaatgtaactttgccttacccttagcaattgcaggcactatgatacatctgcttttcacatattttaacctaagaacttggattacaaaagatctacatttatcaactataacaccaacatggtatataccaatagttggtaatatattggttccaataacccctataaaccaaattttaggaatatttaattggttcttcttctctataggaataatattttggataattttaacaactattctattttatagaaaattcttccatgaaccattgccagaggcgttattgccttcattatttattttgctagctcctccatctgtagggtttattagctatataaaaataacccactctttagatagtatcgccaatatattatattttacagctttagctttcttattattactagtaactttgattgatagattcgttaaaataagatttaaactaacctggtgggcttacatatttccaatagatgctttaactatagcaacaattttgtattaccatctaactaagatgcctttgtttatagacttagcaatagcaatagaaagtttggccacaatattgttaacaatagttggaattaaaactctaattgctatcaaaaagggagaaatttgcaaagaggaataa

SEQ ID NO: 29 - protein, 315 aa, Nanoarcheum equitans
MTCRIRYFQPGFFAIPVGIGGLSIAYLRLAELFPYLKSIGLGLAWLSFISLIVIAILYLAKIVFFKQEFLKDINNPIKLSMLPLFSIALLIDSISFGILKCNFALPLAIAGTMIHLLFTYFNLRTWITKDLHLSTITPTWYIPIVGNILVPITPINQILGIFNWFFFSIGIIFWIILTTILFYRKFFHEPLPEALLPSLFILLAPPSVGFISYIKITHSLDSIANILYFTALAFLLLLVTLIDRFVKIRFKLTWWAYIFPIDALTIATILYYHLTKMPLFIDLAIAIESLATILLTIVGIKTLIAIKKGEICKEE

SEQ ID NO: 30 - DNA, 1059 bp, Nanoarcheum equitans
atgcgtattaccgttatagattatttcaaagacatagaagatattattggtataaccgccaaatcaacccaaagtttgttccctccatcagaattagagatagatcaaaaagatatagacgatatgttaaaatatactgtagagcacaaactttcttcagtattagatttcccatactatattatagagatttatggagtttcaagaagctttacccatcaatgggttaggcatagattatcttctcacatgcaacaaagcttaaggtatgttaaaataattgatgagaaggttttagagttatatgaaagtgataaaagaatagaccttattacatatgtgccaaaatggtttgtaatccctccaagcattttaatttctgggaaagaagcgattataaaatatatagaagctatgattaatagttctaaagcttatttagaattactaaactacaaaattccagaaggaaatagctttaaccattggtttttaacaaaaaatagggagtatattccaaaagaagatgctaggtttgcattaccaataggtacaaaaacttttgtcactactgctgcagatgctgaagaatggttgcatattatgaaagttagatgttgtatggacgcccaatgggaaataagaattaccgcttggactataggatttttgttatatttattgcatccaaggattttctatagatttgggccatggtgtatacaagaaagatgcagaggtttctcaataaaaagggatccaacgtgtataaaaaacatatttaatttgaaggaaacattaaaagaaatatcaaacaaaattagggagcattttattaatagagaggatggagaaatagaaacacctttgggaagaattaagttttatatcgaaaacaaaaaatgggatttctttactatagatttaactgatatatttgggtatagaactagtgaagaaattaaaaaagaagttattgattattttgaatcacaaggaataaaattggataaaaatttgttagattttgaagttataggaaggataaggtatatctaa

SEQ ID NO: 31 - protein, 352 aa, Nanoarcheum equitans
MRITVIDYFKDIEDIIGITAKSTQSLFPPSELEIDQKDIDDMLKYTVEHKLSSVLDFPYYIIEIYGVSRSFTHQWVRHRLSSHMQQSLRYVKIIDEKVLELYESDKRIDLITYVPKWFVIPPSILISGKEAIIKYIEAMINSSKAYLELLNYKIPEGNSFNHWFLTKNREYIPKEDARFALPIGTKTFVTTAADAEEWLHIMKVRCCMDAQWEIRITAWTIGFLLYLLHPRIFYRFGPWCIQERCRGFSIKRDPTCIKNIFNLKETLKEISNKIREHFINREDGEIETPLGRIKFYIENKKWDFFTIDLTDIFGYRTSEEIKKEVIDYFESQGIKLDKNLLDFEVIGRIRYI

SEQ ID NO: 32 - DNA, 276 bp, Nanoarcheum equitans
atgcaatataaaataaacatgtatgcgatagtggtttatgatgtaaatgttagtaggcaaaaccaaataagagagtttttaaggaaatatttataccatgtgcaaagatctgtgtttgaaggggaaataagcccttcttctttatattatatgaaaaagatattgcaatcctatattggggaaactgattccttaataatatatgttctgcgagataaaagttgccttatggataaaatagttcttggcgaagacaaagatttacaaatatattag

SEQ ID NO: 33 - protein, 91 aa, Nanoarcheum equitans
MQYKINMYAIVVYDVNVSRQNQIREFLRKYLYHVQRSVFEGEISPSSLYYMKKILQSYIGETDSLIIYVLRDKSCLMDKIVLGEDKDLQIY

SEQ ID NO: 34 - DNA, 1002 bp, Nanoarcheum equitans
atgaaaactatatacatacttagtataggcaaactttataggggtaagaatggcctttactttattaacaaagacaaaaagaaaagtcccatacctttggaaagcataaaagagatatttatcctaaacaaagtttctgtaacctataatgctttaaaactattagcagatagaaatattccaatacatttcttttatgaaaatactaaaaaaggaatatcctattatttgggttctttcttaccgaggcaaaagacaaaatctggtttagttttagtaaaacaagttgaggcatataaagatatagaaaaaagaacagaaatagcattagagatagttgatgctattagatataattgtataaaggttttagaaaaataccacattgatgaagtaaaagagttaagaaaaatagatgtttggaaaatgtttgaagaaagtttaaatgactggaaagatgccataaatataataaggggtatagagagtaatatatggaatctattttaccaaggtttagataaaatattaaaactatataaattagagagaagaactaggaggcctcctaaaaatgaggctaatactattgtaagttttgcaaacactttattatatggagtaactttaacagaaatatacaaaacccatttggatccaactatatcttttttgcatgaattaagagatacaaggtattctttagctttagatttgtctgaaaatttcaaaccaataattacttttagaattttgatttggctagtaaaccaaggaattataaaggatacacattttgttaaaggtttaaatggagttttgttaaatgagcaaggcaaaaaattagtaatcaaagaatttaataaaagattggacgaaactattaaattgaaaagcgggttaaagagaagcatgagatggtatataaaagcacaagcctataatttagaaaggtttttgttagatggtagaaaattcaaagcttttaggttaatttattaa

SEQ ID NO: 35 - protein, 333 aa, Nanoarcheum equitans
MKTIYILSIGKLYRGKNGLYFINKDKKKSPIPLESIKEIFILNKVSVTYNALKLLADRNIPIHFFYENTKKGISYYLGSFLPRQKTKSGLVLVKQVEAYKDIEKRTEIALEIVDAIRYNCIKVLEKYHIDEVKELRKIDVWKMFEESLNDWKDAINIIRGIESNIWNLFYQGLDKILKLYKLERRTRRPPKNEANTIVSFANTLLYGVTLTEIYKTHLDPTISFLHELRDTRYSLALDLSENFKPIITFRILIWLVNQGIIKDTHFVKGLNGVLLNEQGKKLVIKEFNKRLDETIKLKSGLKRSMRWYIKAQAYNLERFLLDGRKFKAFRLIY

SEQ ID NO: 36 - DNA, 1278 bp, Nanoarcheum equitans
atgacaggaaaacctgacaattctttaacaatagatctatcaaaacttaacgatccttattacttcaatgttctcaaaagtcttttgggccatcttaaggatgctaggagtgcaaaagatatccaaaaactcatagaaatcctaaaaaacgaatctgaaaaatccatagaagaggatattagagcatctattttacccacatccgtttctaaaaaagaaggaagaaatttttacttaccaaaagaagggttgttagtagaggaagaagtaaacgaattaatagacgatttagcaggggtatatctatcttctggaggaaatatctacttattaaaaataaagaatagccaattgtttgaaaattatagtaataaaataaggggagaaggtattttggataatggaatagacaccaaacgcttattgggcgaagttgggcttccccgtggtgtaaagatttcaggagattttccaaatataaatttatttctaattttaaatgattttatattgtttatattaggttctgagaagttaaagaaaagtataaaccttaaagtagaagagctatctgatgacgttttgaaaaatttcttacttccttatttaaaagatatttcttttacttctggagtatatactgtactttctagacaaaagaaaaggaagtattacattacgaatcttaccgactttatactaaaattttacaaaaacgagatagagaatccatcaagctcgataatagggaagtttacattctctttttatataacagataaagatttcaaagataaagccctaggattactagacaaatttttgtattatcttattttcaaacattccattaattggaaaatcctttgtgatatgttaaatattttctatgactataactataagaaatatttaaaaaataacaagcaacctatacatatgagatccgcaaaggaattctttgcaatgatgaatttagagaaaatctatgattgggcttatgcgacaggaaaaacgattctagaagtggataaagaaaatggtaaggattatgttaacgagatcataaaggaaatcaagaaggaggagttaccagggaagtttaaagaagaactatccaaagttttacataaggtaagtgaaaaaataagaaaagacacaagaaatgatcaattcaatctacacatacatccagacatagctaaaaaagatttacaaggagacgagttttataaggtaaaggccgcagttctagctggtttaatgaactccctatga

SEQ ID NO: 37 - protein, 425 aa, Nanoarcheum equitans
MTGKPDNSLTIDLSKLNDPYYFNVLKSLLGHLKDARSAKDIQKLIEILKNESEKSIEEDIRASILPTSVSKKEGRNFYLPKEGLLVEEEVNELIDDLAGVYLSSGGNIYLLKIKNSQLFENYSNKIRGEGILDNGIDTKRLLGEVGLPRGVKISGDFPNINLFLILNDFILFILGSEKLKKSINLKVEELSDDVLKNFLLPYLKDISFTSGVYTVLSRQKKRKYYITNLTDFILKFYKNEIENPSSSIIGKFTFSFYITDKDFKDKALGLLDKFLYYLIFKHSINWKILCDMLNIFYDYNYKKYLKNNKQPIHMRSAKEFFAMMNLEKIYDWAYATGKTILEVDKENGKDYVNEIIKEIKKEELPGKFKEELSKVLHKVSEKIRKDTRNDQFNLHIHPDIAKKDLQGDEFYKVKAAVLAGLMNSL

SEQ ID NO: 38 - DNA, 969 bp, Nanoarcheum equitans
atgatgaagaccgttcaaatttctatattagctagagtatatggaaatgtaaatgcagacgaaacaataggaaacagagttacaataaagaaattctatagctctgaaggagaagttttaccattcgtttcagcaagggcaataaaatactctataagacaggcattaaaagaaagaggattcgagatagacccattcgtagctgaaaagaaggagatgagggattctggtaatccaataaagtatgtagataatgatttgttcggttttatggcaccctacaaaggaaaaaagaaaggagaagggggttctgtaaatagacaagcgccaattgctatatcatattttaaagctctaaaaaatactccaataaatgtagagtttggtgcgagatttccaagggaaaatactataaaaatagataaggaaaaaacagaagaatcgaatcaagaatcagatcaaaccttgaacccaataccttttgaagtagaagttgcagattttattggaagattaaatgtgttaatctatgagaatgttggtaagtttacagaagaagagctaactaatgtacaagataaaaatatattacaaaatatactacagaaggaaggcaaactttatgttttaccagaagaagaaaggaaaaaaaggctaaaagctttcttagaaatactattaataccaagttatgttttaccgaggagaaccaattcgctaaacattccagagtacaaagtcgctttaatagtattaaacaaggagggagttctacccatataccaatatctggattatgtaaaagagggagtggttaatttagagaaattgaaaagattaaaagaaatagttgaagaagcggggagcgaagcttatataattgactatgacggctgggttgaagaagagatattcccaaaaattactgttaagcaagctgtagaaaaaatattaaaccatctattatga

SEQ ID NO: 39 - protein, 322 aa, Nanoarcheum equitans
MMKTVQISILARVYGNVNADETIGNRVTIKKFYSSEGEVLPFVSARAIKYSIRQALKERGFEIDPFVAEKKEMRDSGNPIKYVDNDLFGFMAPYKGKKKGEGGSVNRQAPIAISYFKALKNTPINVEFGARFPRENTIKIDKEKTEESNQESDQTLNPIPFEVEVADFIGRLNVLIYENVGKFTEEELTNVQDKNILQNILQKEGKLYVLPEEERKKRLKAFLEILLIPSYVLPRRTNSLNIPEYKVALIVLNKEGVLPIYQYLDYVKEGVVNLEKLKRLKEIVEEAGSEAYIIDYDGWVEEEIFPKITVKQAVEKILNHLL

SEQ ID NO: 40 - DNA, 705 bp, Nanoarcheum equitans
atgaaagccttagcttttaggatttctttttttgaacacctcttcaaaaatcattatactaaagcgttcaagttatcttatccaaccttgttgcctacagaagctctaggattgataggcaacatctgcggttatgatagaaaaaatgtttataaagaactaaaagatctctattttggttccacttttttagatggatactatattgaagaaaatataacttttatccaattcaaaaaagagaccggtggtaaatacagatctggtatagttaaatcccaggtatatcacaattcggaacatttggtaataattgctggggatgagaaaaaactgaatgaaaaaatactgaacaagattaaaactctaaactctgatcctatagagaacaatttaggtaaatggttactagttaaaccaataagatatccttatggagggtggaatgatttttttgcaaaagatataaggattttggataaatttttagaagtagaggaaaaagagaatgttaggggatatgttcctttggattgggttaaaagcataaatgaaaactcagaaatagaaacaatgcccgtaaaatacaaaaacaagatggaatatttcgtttttataaaaagagggtatgcgttgttgaaggaaaaggtaaaaaccgtcttagatatacctatatactctttagaagacttcaattatttatga

SEQ ID NO: 41 - protein, 234 aa, Nanoarcheum equitans
MKALAFRISFFEHLFKNHYTKAFKLSYPTLLPTEALGLIGNICGYDRKNVYKELKDLYFGSTFLDGYYIEENITFIQFKKETGGKYRSGIVKSQVYHNSEHLVIIAGDEKKLNEKILNKIKTLNSDPIENNLGKWLLVKPIRYPYGGWNDFFAKDIRILDKFLEVEEKENVRGYVPLDWVKSINENSEIETMPVKYKNKMEYFVFIKRGYALLKEKVKTVLDIPIYSLEDFNYL

SEQ ID NO: 42 - DNA, 2268 bp, Nanoarcheum equitans
atgaagtgcaaatcacatcccaataaattattagaccaacacataaaagagattaaaaatatatttaataatttggttaatttctatgatattgaattaaacgaaacagagaagaagctgtttgattatttaatagagttacatgacatagggaagtgcagaaaagaattccaagaatatataaaaaaactggaaaaaggcgagaaaccaaaatctcccggtagccattctttatggtctttggaggaactggaaaggattttatctaaaatcgatttagataaggaatatttacccttattattttattttattgcgaaacatcactctaatttatctttaagtaatactgatgaaaaattaaaaaggcaaatagctaaacttattcttaaattaaataacttgctaaataaccagcccgaaatagatttattgctaaatcaaggattttttgaaatctattataagggtttacttaaaaagttcgaaaaagaagaattaataaaattggcggatctatttggagtattcaaaatttcagatatcttatcagctaaaaatattttagataaagttaatgaaatagtttataaagaggaaattacagaaagaaaagttgagcaattaatagggagaagtattgatgaagaaagatggggtttccaaaagtgtttgtcaaaatttgattatttgtccctaagagcgccaacaggatggggtaaaacaactactgctttattatttgccttaaataaagattataacaaaatatttattactcttccaacaataacagcaatagaagattttcgtcaaaaactaaaaaatgctggttttaaagcagaggaatatttctatttctacgatgctagagcaattttagacgaagaggatgagagattaaatagtttatattttgtccaaaatctctattctcctataaatattactacgatagatcaaatattgttatcatttctgcaagctggcaaatattttatgaaaaggttaaatctaagaaaatcgatattgattatagatgaaatccatctattaacaccacaaatgttgttcttgcttaaaaaactgctagaacatttggttccactctacaaaattaggttattattaatgtctgcaaccttaccaaaaggaattattgattacctatcagaaaacattaatatcaaatttgaattcgtagatatatacgaattggaaccaaaatatagaaatagggaaagagtggaaatagaattaataaaaaaggacatctcggaaaacatagagaggatagttgaagaaaataaaaagggaaagagcgttttagttatagcaaatactgtggaaaaagcagtatgtatttataaaagactaaaagaagagtacaatataaacaatatttctttattacatggaagatttatgtttaaacatagaaaagagagagaaagggaaataagggatttgttggaaaataaaggaattttggtttctacccaagttacagaagtttctttagatgtggattttgatgttttgtttacggaggctgcaccaatatcggcaatagttcaaaggttaggtagagttaatagatatggaaaaaaatcaaaatccaaagtgtatatctattatcctaaggagatagataaaattgaagaggacagaagaaaaaagtatccatacaatattgaagagataaagaaaagttggaaatttttagaagaactagataattttaaagaagggattttcataaaaaagattgatgaggtatttactaaagaattttatgaagggttaattaaaggggaagaaatcttttttaaatttagagaagtttttgaagatagaaaatcccaaaataatatacattggtttttgcaaagtacatctgaagaggtaggaaaaaaattattagactttagggataatgttaccacattaataattccctatggcgatttggttgaagccgagatttatgatgagataaccaaaattctagaggaatacaaaaaattgaaggaaaagccctactcatatgacgaatggaaaaagttttttgcgaaagccaaagcccatgcagtatcagtaccattatatctagttttagggttagatccagacaaagttggtttgcctgtaattaataaacttaaggaggattatgaatttaaatattttaaagaatgtgggtttgtgaatttgaaaaaactgaaagaaatggggtgtgaatttgatagtgattatacttatcaataa

SEQ ID NO: 43 - protein, 755 aa, Nanoarcheum equitans
MKCKSHPNKLLDQHIKEIKNIFNNLVNFYDIELNETEKKLFDYLIELHDIGKCRKEFQEYIKKLEKGEKPKSPGSHSLWSLEELERILSKIDLDKEYLPLLFYFIAKHHSNLSLSNTDEKLKRQIAKLILKLNNLLNNQPEIDLLLNQGFFEIYYKGLLKKFEKEELIKLADLFGVFKISDILSAKNILDKVNEIVYKEEITERKVEQLIGRSIDEERWGFQKCLSKFDYLSLRAPTGWGKTTTALLFALNKDYNKIFITLPTITAIEDFRQKLKNAGFKAEEYFYFYDARAILDEEDERLNSLYFVQNLYSPINITTIDQILLSFLQAGKYFMKRLNLRKSILIIDEIHLLTPQMLFLLKKLLEHLVPLYKIRLLLMSATLPKGIIDYLSENINIKFEFVDIYELEPKYRNRERVEIELIKKDISENIERIVEENKKGKSVLVIANTVEKAVCIYKRLKEEYNINNISLLHGRFMFKHRKEREREIRDLLENKGILVSTQVTEVSLDVDFDVLFTEAAPISAIVQRLGRVNRYGKKSKSKVYIYYPKEIDKIEEDRRKKYPYNIEEIKKSWKFLEELDNFKEGIFIKKIDEVFTKEFYEGLIKGEEIFFKFREVFEDRKSQNNIHWFLQSTSEEVGKKLLDFRDNVTTLIIPYGDLVEAEIYDEITKILEEYKKLKEKPYSYDEWKKFFAKAKAHAVSVPLYLVLGLDPDKVGLPVINKLKEDYEFKYFKECGFVNLKKLKEMGCEFDSDYTYQ

SEQ ID NO: 44 - DNA, 507 bp, Nanoarcheum equitans
atggctttaattggtggtgcctatatatattactattttgtatgcaaaagaaagctctggttttatgctaataaaattacaatggaacatgaatcagatttggttcaaataggcaaatacatagagttattttataaagaaaaacataaatatgagagaaaagttataataaacgaaatatcgcccgatgttataaaaaggtacaaagattttgttttggtttttgaaataaaaaaatctgacaagtttaaagaagcagctttatggcagttaaaatattatttatggtatttgaaaagactaggattaaatgttaaaggcaaactagttattcccgaatataataaagaggaatacattgaattaactgaaaaggacgagagaaaaataaaagagattttaaatgaaataaaaagaataatttcgatggataagccccctagagaagtttttaaagattattgtaaggcttgcgcttattaccctttgtgctgggaaggttattga

SEQ ID NO: 45 - protein, 168 aa, Nanoarcheum equitans
MALIGGAYIYYYFVCKRKLWFYANKITMEHESDLVQIGKYIELFYKEKHKYERKVIINEISPDVIKRYKDFVLVFEIKKSDKFKEAALWQLKYYLWYLKRLGLNVKGKLVIPEYNKEEYIELTEKDERKIKEILNEIKRIISMDKPPREVFKDYCKACAYYPLCWEGY

SEQ ID NO: 46 - DNA, 894 bp, Nanoarcheum equitans
atggttataccagtctcgcccatactatttatgtgtttgatcactaatactaaatttgatgaaaaagaattcgaaatagaacgcgaaatagtattaaacgagataaagagatatgattctaggcctgcaggaattttatgtaggaacatccctaaatctttgtttggggaatctgactatggagaccccatcgggggatacgaagaaactataaaaaatatagaaaaaagtgacttagaagaattcaaacaaaaatactatgtttcaaataatatgtttgttgtagttaatgggaatataaaagagaagcataaacaaataatagaaaaatatttttctaaaatagaagaaggaaacccaaaaaagaaaaaacctactatagggaagggcaaagatatagaaataaaatttccaactaagctagttcattgttctttaaatttcgaagcgcctttggatttaagatataaattattaacttctatagttggctatagaggattgatgaacgccatttttagagagaaatacggaatatgctatagttgcagtttctacatttataacacttatccggatagactcgctattagtttagaattaccaggaatagaaaagcaaaagcttgatttggtagaaatagctaaagaggaattctttgaaaagctaaaacaactagatgaacaagaatataaaaaagcaatggaaaagttcaaattggactttatgacaagtaaatacaacctatatttaaaaacaaaaaaagatctaatatatattaactattttggaaaaccttgggaatccatatacaaagagttgcttaatataaactatgaagagttaaaagagctaactttcaaaaatggcaaaaaagttattgtaagcgattaa

SEQ ID NO: 47 - protein, 297 aa, Nanoarcheum equitans
MVIPVSPILFMCLITNTKFDEKEFEIEREIVLNEIKRYDSRPAGILCRNIPKSLFGESDYGDPIGGYEETIKNIEKSDLEEFKQKYYVSNNMFVVVNGNIKEKHKQIIEKYFSKIEEGNPKKKKPTIGKGKDIEIKFPTKLVHCSLNFEAPLDLRYKLLTSIVGYRGLMNAIFREKYGICYSCSFYIYNTYPDRLAISLELPGIEKQKLDLVEIAKEEFFEKLKQLDEQEYKKAMEKFKLDFMTSKYNLYLKTKKDLIYINYFGKPWESIYKELLNINYEELKELTFKNGKKVIVSD

SEQ ID NO: 48 - DNA, 1098 bp, Nanoarcheum equitans
atgcccagggccataattttaggaggaggtgtagcaggtttgcaagcagcccatttattaaaagataaagcagaggtatatgtaataacagagaatgactattacattagcgggccttcgagaccattaattttaagcaacgaacaacaattagatagaatagttagaggttacaaccatttacctaaagaaataaaagttttgtttggcaaagctaaaatagatttagaaaacaacaaagttttagtgaataataaagaattagaatatgattatctaatcattgctaccggtataaaatatgattataatgcaatagatattaaggataaaatctataatgtatacgacataggaaaacttttcgatttaaaacatttgatttggactataaacaaagggtctatattggtttatgcgccaaaacaaccttatagatgtgcccctgcccccggggaaacaattatgactatagacatggtattaaggcatagaaaagttagagataatataaaattaatatttgtcgatgctaacgaaaaggtacaacctccagtaatacacgatgtatggataaaaagatttgaagaagcagggatagaatattatttaggcaaagaaattgtagaagtaaacgaaaagggcgtaaaactaaatgatggcacatttatagaagcagattacaaagttattttgcccccaaacaaagctaacaaccctataggagaaggctttatagaagtaagaagtccaaaagatttaaggttaaaagattacgataatgtttatgctgtaggagatgttgctaaattgcccttccctaagaatgcagaaatagctttgcaaagcgcaataaatgcagcaaaccaaataattgcagaaatagaaggaacagaatataaaccacaagactatagatttggaggatgggcttacatgggtaatttaaaagaactaaaaactgaaagtacattctttagcttagattttagcgaaggtaaacccaaaggaaacaaagacccagagccaaaagtagaatatacaaaaattaaagaccaatgggagcaaagcttattgaaaaagctattcggttactaa

SEQ ID NO: 49 - protein, 365 aa, Nanoarcheum equitans
MPRAIILGGGVAGLQAAHLLKDKAEVYVITENDYYISGPSRPLILSNEQQLDRIVRGYNHLPKEIKVLFGKAKIDLENNKVLVNNKELEYDYLIIATGIKYDYNAIDIKDKIYNVYDIGKLFDLKHLIWTINKGSILVYAPKQPYRCAPAPGETIMTIDMVLRHRKVRDNIKLIFVDANEKVQPPVIHDVWIKRFEEAGIEYYLGKEIVEVNEKGVKLNDGTFIEADYKVILPPNKANNPIGEGFIEVRSPKDLRLKDYDNVYAVGDVAKLPFPKNAEIALQSAINAANQIIAEIEGTEYKPQDYRFGGWAYMGNLKELKTESTFFSLDFSEGKPKGNKDPEPKVEYTKIKDQWEQSLLKKLFGY

SEQ ID NO: 50 - DNA, 774 bp, Nanoarcheum equitans
gtgaaagatctaagtgttattattttatcgggaggctttgcaacaaggttaaaacccctatcagaatacataccaaagcccttattgcctatcggcggtgtaccaataataaattatattttacaaagggttatagaactaaacccagaacgaataataatatctgtaaacaaaaaattcgaaaaccattttagatattggttgaaaactttagaaaacgataaaatcgagctaatcgtaactcctataaaagatgttaaagagcttaaaggagcaatatgggatttaaattactctattaaagaggcttggattaacgaaaacttattagttgttgctggagacaatttgtttgattttaatttaagaaaattaattagaataatgagagaaaacaaatcatttgctttggctttgtatgatgttaaaaatttagaactagctaaaagatatggagttgtaaagctaaaaagcaataaaattatcgattttaaagaaaaacctgaaaaacccgaaagcactctagtttcaacagcaatttatgctatccctaaagaaaaactaagtctaatagatgaatatatagaaaacccaaataatgaaaaagacaaactaggaaaactaatagaatggctactttacacaaaaaatgaaccggtctatggtattatttatgaaggaaactggtttgacatcggtagtttagacgaatacattagagctaataaatttgttgaaaaaacaggttggaataacagatttctgtggccttag

SEQ ID NO: 51 - protein, 257 aa, Nanoarcheum equitans
MKDLSVIILSGGFATRLKPLSEYIPKPLLPIGGVPIINYILQRVIELNPERIIISVNKKFENHFRYWLKTLENDKIELIVTPIKDVKELKGAIWDLNYSIKEAWINENLLVVAGDNLFDFNLRKLIRIMRENKSFALALYDVKNLELAKRYGVVKLKSNKIIDFKEKPEKPESTLVSTAIYAIPKEKLSLIDEYIENPNNEKDKLGKLIEWLLYTKNEPVYGIIYEGNWFDIGSLDEYIRANKFVEKTGWNNRFLWP

SEQ ID NO: 52 - DNA, 309 bp, Nanoarcheum equitans
atgaagacgatagaaatagaaatcgttagacctgtaaacccagtgggtattagctttgtaagatatctatggggagctatggcagctagagacagagaagtattagagaggcatagaaaagaattctctaaactagtacaaaggctaggctatacaatagaagaaaaaattggtactggcaaactaataacaggcaaagtagtaatagaattggatgaagatgacaaaccattaaaagctagagtagaagagctaaaaatttgggagccagtaaaagaaataaatgaaaaaatcgaagttgaattatag

SEQ ID NO: 53 - protein, 102 aa, Nanoarcheum equitans
MKTIEIEIVRPVNPVGISFVRYLWGAMAARDREVLERHRKEFSKLVQRLGYTIEEKIGTGKLITGKVVIELDEDDKPLKARVEELKIWEPVKEINEKIEVEL

SEQ ID NO: 54 - DNA, 945 bp, Nanoarcheum equitans
atgaaaaaatcgaagttgaattatagcgagttaaattctatctataaagatttagtattttttgattctaattatattcgtaaaaccctacatagagctgattatatcgaacaatttttagataaatacaaaatagattatcatatttacgaacattttgttttagttccagattgggtaaaatactatttatacatcgatggacaaaaaatagatgtattgcccaccggtttaaaatctggtaaaatagagaaaaacataaaggattcgtctgatttggagaataactataattatcctaacataaattttaactcttacttagaatctaaaacagatatttcaactccaatattttataatgttccttctttagcagtatcgaaaaatagtataaatcttttattaaactctaatgacgttgatggctatctaaaagtaaaaataagagatataaaaaacaaaaactttgttattggtaatgttgataaagccgaacaagcaatagttgtgcattatgacgctttgtggtatggggcaatagataatacctcttcgcttggattaatattatatatgctaaaaaacaaagaaattaatttgaataagaatgcaatatttttgataggttttacagaaatagcatattattggcccgaatactgggactattcctttattagagttatagaaaaatacgaggatgtttttaagaaagtaaaaagaaaactcataatagattgtattggatataaggatacacaatttttaacggacaaagaatatatcgaagcttatggtgtgtttggtgataatatattaatttatggtactcccttagagggtttaatagcaatataccatgctacaaatgatacaatagacaaaataaattttgaccaattgaaaaaagatagagactcactcaaaacctttctttcttag

SEQ ID NO: 55 - protein, 314 aa, Nanoarcheum equitans
MKKSKLNYSELNSIYKDLVFFDSNYIRKTLHRADYIEQFLDKYKIDYHIYEHFVLVPDWVKYYLYIDGQKIDVLPTGLKSGKIEKNIKDSSDLENNYNYPNINFNSYLESKTDISTPIFYNVPSLAVSKNSINLLLNSNDVDGYLKVKIRDIKNKNFVIGNVDKAEQAIVVHYDALWYGAIDNTSSLGLILYMLKNKEINLNKNAIFLIGFTEIAYYWPEYWDYSFIRVIEKYEDVFKKVKRKLIIDCIGYKDTQFLTDKEYIEAYGVFGDNILIYGTPLEGLIAIYHATNDTIDKINFDQLKKDRDSLKTFLS

SEQ ID NO: 56 - DNA, 1095 bp, Nanoarcheum equitans
atggaaaatagcgcaatagctaaattattaaaaaacattcttggaaagcgaagtttaagatctttattccctcatagggggagattgccttacacattaccccaaccactagaatcaagaatagaaaaattcttcaatttctataaagaaaatagagaagagctaaaaaaagcagggatagatgatttaccctcgtttatatacttctcggtatacaaccttgataaaggtgttttggatccctatgatccgttggctatttctagaaggttggtattttattatatatggcaacacttaccatgggatcttagggaatactatgaaaaaatttctgtctcccctaagtacagaaataacaaagatccagtcgagttgttatatgaagaaaagaatcgaaaagaattggatggaattgtaggttttgatatatacgaaaaaccagagttaaataggttgtatatcgctggcacagtgtttttctctataaagcttaccaaactggaggatatgtatgcattattggcctgtttatataacccacagttgtgtagtgaactcggtaaaagtgtaacgccctttcctcgtaaaaagcacgaaccctacgatcccgaaaaaataattaataaatttaaatccaaggaaaaagaaattatggatacattagaaaaagtcaaaagagtacctttcgatactatagacaaggaaaccttcttacctcactatgctaaagcctcagtaatcgcttttggtgacagaaaggcaaaatccatagcttatgatttgttaaaattccaaacattttacgaaatatggaacaaatatagacataggaatattctcgatatatttctatactatttggcccatagaaaagatcaaaattatctctctgcaagaactttaagacggttggtttctatatataagataatggattttaataggttagaaagagaaattagtaaacaaaaacaagaatatgaaggattagacttcgttagaatagaaggagatgacacttactcaatagttataacagtactagatagaaataaattgatagaatatctaagaaagaaaggttttgagtga

SEQ ID NO: 57 - protein, 364 aa, Nanoarcheum equitans
MENSAIAKLLKNILGKRSLRSLFPHRGRLPYTLPQPLESRIEKFFNFYKENREELKKAGIDDLPSFIYFSVYNLDKGVLDPYDPLAISRRLVFYYIWQHLPWDLREYYEKISVSPKYRNNKDPVELLYEEKNRKELDGIVGFDIYEKPELNRLYIAGTVFFSIKLTKLEDMYALLACLYNPQLCSELGKSVTPFPRKKHEPYDPEKIINKFKSKEKEIMDTLEKVKRVPFDTIDKETFLPHYAKASVIAFGDRKAKSIAYDLLKFQTFYEIWNKYRHRNILDIFLYYLAHRKDQNYLSARTLRRLVSIYKIMDFNRLEREISKQKQEYEGLDFVRIEGDDTYSIVITVLDRNKLIEYLRKKGFE

SEQ ID NO: 58 - DNA, 516 bp, Nanoarcheum equitans
atgaaggcgaagaagttattaatattcgtgccattgttgttactgcctttattaactttattaatgcacaaaaccgaacctaagcattataagcattataatatatatgtggtttactctccttattgtccacattgccataatttgcttaaaactttagatgaattaggaattaaagctataacaattgattatagggaatttccgaaaactccttattacaaatttgttgccaaatattttaatggtgttcccttggtttttgctaaaaccaaaaaccagctaattataataagcgggtatccatcggaaatacaagataataatggttactattatggaaaagaatatgaaattgaattatgcaaaaaattgggaggcaaacccgtatatattaataatagttattatttctgtgaaataaataacacaatattgggaaacagaaaagctattgaatggctaataaatatatgtaaaagccaaggatgcgaaaatctaactatcataaaatag

SEQ ID NO: 59 - protein, 171 aa, Nanoarcheum equitans
  SIGNAL (1)..(22)
MKAKKLLIFVPLLLLPLLTLLMHKTEPKHYKHYNIYVVYSPYCPHCHNLLKTLDELGIKAITIDYREFPKTPYYKFVAKYFNGVPLVFAKTKNQLIIISGYPSEIQDNNGYYYGKEYEIELCKKLGGKPVYINNSYYFCEINNTILGNRKAIEWLINICKSQGCENLTIIK

SEQ ID NO: 60 - DNA, 636 bp, Nanoarcheum equitans
atggatcttgttataacaacgaaattagcattggttgatgcgattaacccttgtgtattagcgatacaagcatctttattagcggtgttattaactaaaagtagaagagatgctttaattggtgggattttgtttaccattacaatattcataatgtatctattgtatggtttgatattacattctatattatcaatgttctatgattatgtaagaatatttttgttagttttgctattggttttggccatattagaaatagcagcatactttaattacaaaccaggtttaatatcgatagagatgcccataaaattaagaccattggctaaccaattaatagaaaataccaaaaatcccttaatagcgatcccattagcgatattgttgagtttatttctattaccatgctcttccggtccatatgttagctttttaggattgcaaaaaacaattgattgggtgttattgttatattatctaacaatattcgtttcaccaatgattctaataactttgttagtgtattatggattttctccagaaaaaataaaagaatggagagataaacatattagggaattgcatttagtagcaggtatactattgttgttagttcttctatacttgatatga

SEQ ID NO: 61 - protein, 211 aa, Nanoarcheum equitans
MDLVITTKLALVDAINPCVLAIQASLLAVLLTKSRRDALIGGILFTITIFIMYLLYGLILHSILSMFYDYVRIFLLVLLLVLAILEIAAYFNYKPGLISIEMPIKLRPLANQLIENTKNPLIAIPLAILLSLFLLPCSSGPYVSFLGLQKTIDWVLLLYYLTIFVSPMILITLLVYYGFSPEKIKEWRDKHIRELHLVAGILLLLVLLYLI

SEQ ID NO: 62 - DNA, 513 bp, Nanoarcheum equitans
atgtttagtttcgaaattgagaaaaaaccaaatataataaggaataaaaagaaattggaagaaagactaaacatagaattggaagaaaaagagaacagttatatagttaaagcaaatgatggattaaccttaaacaaggcaataaagattattgacgctttaaatgctggtttcggggaagaagcttacaaattgttagatgataactatgattttatggtaatccccataaaaagggcaacaaaaaatgataaagagagaaaaaggattcttgctagactaattggaacaaaggggaaagctaaaaagaatatatccaatctaacaggggtttctgttataatagatgataagaaaaaagaagcctatttgctaggaaagatagaggatttaattatagcgagagagtccataaatagaataatagagggccagccccatgggaaggtttattcctttttagaatcgaatagaaggcttaaaaagctcagagatttaagagattctctctaa

SEQ ID NO: 63 - protein, 170 aa, Nanoarcheum equitans
MFSFEIEKKPNIIRNKKKLEERLNIELEEKENSYIVKANDGLTLNKAIKIIDALNAGFGEEAYKLLDDNYDFMVIPIKRATKNDKERKRILARLIGTKGKAKKNISNLTGVSVIIDDKKKEAYLLGKIEDLIIARESINRIIEGQPHGKVYSFLESNRRLKKLRDLRDSL

SEQ ID NO: 64 - DNA, 1152 bp, Nanoarcheum equitans
atgatgaatgtaatagaccgtatgagaaaaattcccttgcctaagaagtttgtctataaaattgaagaaaaagcaaaaaactatataattaaagaaggtcccaaacttgctccaaaattggcatcggtattgacaattttagccggagcaggtttggcaatggccaaagaatatgaaattgaccttagctctgtaaaagagggcaatatccaatacaaaaatataaaagtaaaacttaatgatacagatatttcattaaatgggaatgatatggttgactatgtttatgagaaagatggtttcaaatatattgattatttaaataaagtagtaagtgacacttcgggcgactggtatgtaaataacgctttctttacttcaagtgtcaataacccattaagatacagcgatttaatcgaaaacgaccaaataaaattgtctatccctactaaagaaaaagaaatcaataaattattagatgaaaccgatacattaaataatttgggaggggcttaccaaataaccgatggtactttagttataccaaaatttgaatataatggcaaaactcataaggtggaaatccagttagatggtgtaaataatgcgaaattaaatataaaattcaaagtattacccatagtaatagatgaaaagggtcttaaattcaatgatagtgagtccttatctaattactattttgacaaaaataaacttatagattacttaaccaacatagcaagcaagatgaaggatacaaatggccatctaatagtaaaagatggggctgtatttgtagattacgataaagacaatatctgggatgctggaatagaacctggcacatatattgatgataccgatttgggaaaaattctaacaggtagagcaatatatgctattggtaacatttctatggacagtttaccacaatatataaaggtagatgggaggaatgtggattcgtcgaatcccatctatacaaatataagtagggcattacagaatggcatatcattcgaaaaactgctgtatcttgtagatgttagcgaagtggatgctgattactctaaaaaattcgctattcctgcaccagtgcttggagtaatgggattggtaccattatttaaaagaaaaaggaaaaatgcttag

SEQ ID NO: 65 - protein, 383 aa, Nanoarcheum equitans
  SIGNAL (1)..(55)
MMNVIDRMRKIPLPKKFVYKIEEKAKNYIIKEGPKLAPKLASVLTILAGAGLAMAKEYEIDLSSVKEGNIQYKNIKVKLNDTDISLNGNDMVDYVYEKDGFKYIDYLNKVVSDTSGDWYVNNAFFTSSVNNPLRYSDLIENDQIKLSIPTKEKEINKLLDETDTLNNLGGAYQITDGTLVIPKFEYNGKTHKVEIQLDGVNNAKLNIKFKVLPIVIDEKGLKFNDSESLSNYYFDKNKLIDYLTNIASKMKDTNGHLIVKDGAVFVDYDKDNIWDAGIEPGTYIDDTDLGKILTGRAIYAIGNISMDSLPQYIKVDGRNVDSSNPIYTNISRALQNGISFEKLLYLVDVSEVDADYSKKFAIPAPVLGVMGLVPLFKRKRKNA

SEQ ID NO: 66 - DNA, 1788 bp, Nanoarcheum equitans
atgcttagacttataatattatttttaactattattggagcattagctatcaatgtaaatgtatatagtggcactttagtaaagagtgaggataattatttaattctattaaaaataggagaaggttcttttgatgcaaataaagtgacaattacttcgttaaatagcacattttatttagattattttaacaatataaattcgtctattgataattatgtatactttgactgccccagtggtataaaacatacaattacctttcatgatgtaataaatgttgggacggatagaggaagaataccacaacctacaataattcttgatatacctaacgaaacagggtgtaaactaataatgaaagattataataatgctttggaaagatctgaatttaatgtttctgtttgtaaggacttaacttgtaacaaaaaccatgtacaaaaagtcctatctgtacaacctaccgcaacactaagcgtttctcccagtactattaatgttggagaaagcgtaacaattactctaaccgccaataattgttacaaagatcctgttaatttaggaggaagctacgaaattaccgatgataaaagtgaaatatcttacagtggtacatttaatgggaatttaagtattagcaaatcgtttacactcacacaaacaggtacacacactataacagcgaagctctattgttataatggaattataacaaaaactgctactgttagagtaaataaaccatctcctactccatctccatccccgaaaccatccccatctgtttctttgagcgttacacctactagcataaaccagtatgaaagtatagagataacagcaacaataaataattgtaatgggggaacattccatatatgggatagccaaggtgaatatgacaaaaccggtaatgtaacaggtaatacatatacttttactgatactatacaactaactataccgggtactcatactatatctcttagtgcaacatgtaatagcaataattacacagatagcaaaacagtaattgttaacgaagtaccattacaaattaattccgtaacaccaataaactttacagctattaaaattgtaacgaacaaatatgttaatactataaatgctactttaaatgaaaaatatttgcattggacgccttctcaaagaaaaatcgagaattataacgagaaagttgattgttcacaacaaggcataaaatatgaatatatatgtgtatttaacaattttatagccaatggatcaaaaataacaatagaagcggatagtaaacaatttaactttgctatgaataatgaaacattgccagacattttatattatatagagcccaacaaacccattttcatagcttttgaaggatatgttgatattagttataaaccatttaatgatgctatctccaatttaacaggaactttcatggcttatgttaatgaaacccccatattgtatagcgatttcagtgattatttacccccatacctagcatatttcttaaatatatcaaatgcggtatacttacctataaaatataaaaatgtaacaaatcccaagaaatataatctcgaaaagggcaaatattcattattagcacttgctggtaatatagatggaatggcaaacaaagtttctatagatttatccaattttgaagtgttcgatttagtgtgggatttcagagagggaaaacaaaccaaagtatttgatttaactccatattgggcaaagcctttaacaaatataacatggcctaactaa

SEQ ID NO: 67 - protein, 595 aa, Nanoarcheum equitans
MLRLIILFLTIIGALAINVNVYSGTLVKSEDNYLILLKIGEGSFDANKVTITSLNSTFYLDYFNNINSSIDNYVYFDCPSGIKHTITFHDVINVGTDRGRIPQPTIILDIPNETGCKLIMKDYNNALERSEFNVSVCKDLTCNKNHVQKVLSVQPTATLSVSPSTINVGESVTITLTANNCYKDPVNLGGSYEITDDKSEISYSGTFNGNLSISKSFTLTQTGTHTITAKLYCYNGIITKTATVRVNKPSPTPSPSPKPSPSVSLSVTPTSINQYESIEITATINNCNGGTFHIWDSQGEYDKTGNVTGNTYTFTDTIQLTIPGTHTISLSATCNSNNYTDSKTVIVNEVPLQINSVTPINFTAIKIVTNKYVNTINATLNEKYLHWTPSQRKIENYNEKVDCSQQGIKYEYICVFNNFIANGSKITIEADSKQFNFAMNNETLPDILYYIEPNKPIFIAFEGYVDISYKPFNDAISNLTGTFMAYVNETPILYSDFSDYLPPYLAYFLNISNAVYLPIKYKNVTNPKKYNLEKGKYSLLALAGNIDGMANKVSIDLSNFEVFDLVWDFREGKQTKVFDLTPYWAKPLTNITWPN

SEQ ID NO: 68 - DNA, 636 bp, Nanoarcheum equitans
atgcctgcaataccaaattgttattatggcaatataactaacctatgtggaatagatataaataattctttgctaattgcagagccatcaaatagctctatagaagttgtttgtgatccaaactgccattatggagggccaaaagttaaggacaaaaagctatgcctaaattccggtaattatagtttgtatattttgaaaaatgataaaaaatggtttgttgaaacattagaagtaaatgcgaatggctctgtagtaaaaaaagatttaacatttagatgtaacaaaacaaccaataataccaataatacgaatagtacagaaaatagagaagttagtactgacaataaaaatagaagcattaataataaaaagttaagcacatacaataaaattagtaatattgtagttccagtaacaaacaataaccaaaaccaatattatatcccagcattgtattctatacaagctaatccaaccaattctatgtcttttagcgaaacatatgagagtaaacaagaaatgcaaaaacaaagcacacaaaatatagtaacaatagaggaaaacaacaattggatatggatactgcccattataatatttttggttagctttattcttgctaaaaacctttaa

SEQ ID NO: 69 - protein, 211 aa, Nanoarcheum equitans
MPAIPNCYYGNITNLCGIDINNSLLIAEPSNSSIEVVCDPNCHYGGPKVKDKKLCLNSGNYSLYILKNDKKWFVETLEVNANGSVVKKDLTFRCNKTTNNTNNTNSTENREVSTDNKNRSINNKKLSTYNKISNIVVPVTNNNQNQYYIPALYSIQANPTNSMSFSETYESKQEMQKQSTQNIVTIEENNNWIWILPIIIFLVSFILAKNL

SEQ ID NO: 70 - DNA, 1401 bp, Nanoarcheum equitans
atgaaacgttttctcccagcagtagtagttttgggtttagccctagcagcaccaacagcgcaattggaagtaatagattaccctaatacagtatatactaaaggagtaatggcgaagagcacaattccaattactataaaatataatactactgatgcaacaaactccaagcttatagtatatttgataaaccaaaatgagaaaaacttagcattgatggaagaatacaaaatcgatgcgggaaaaactaaaatagaaactatcgaaattccattatataatttgcctgattacccaaatgttgatgatggtatatacacaataaagtttaggttaatctcttttgataacaatggaaatactgcggctgatgaaaaagagataaacgtttctattaatgaaccatttgatgtcgcacaatatgatttagatgttctagatttacctttaccagaagacaaaatagtatttaccaacacaaaaacgaaattccaaatccctataatttatgatgggatagcaaatagcgattatgttactgtaacattatgcgctatagctaatggaataaaattggcttgcaacgataccagcaaaacattaacaacaagggaaaacttagtagaattagtaatgaatattccatcctttacaggggatggcaaattaatattatcggtaaaagacaacaatgggcaaaacatagtaaaagaatatgctgttaaatttgttgatggcacattagatgtaaatgtaatgcctgtaagcgaaaaggtaatgcaaggcgaatccacatctattatagttagagtaaacaacccaatagaaaaaagcagaactgtatacttaacaataaaaaccccaacagatacaataaccaaaactatttatttagaaggctatagtagtgcccaattagttattcctataaaggttaaaaccaattcaaacaaatttaatgtatatgtatacgcaagcgatggagtatatacatacagcaaacaattaacattagatgttgtctctaaacaagatataataaacaacatcgatgttagttatgaaaaagacaaaatagagctaatattatatccaaagcaaccaggggttgtgacaataaaagtgttggccgatggcgctatagtagatccttccataaaaaccatatctttagactacaaagctaaaaccgttagttttaattacaaaccattaaaagacacagcaacaataaaatttgaagtatatgatctaaacaataataagatagctgaaaagcaaataaaaatagtgcaaaagaaagcccaacaattcaattggttattacccatagcaataataatagccctaggattgggcctatatttaggtagaaaaaagaaagaagaaattgttgaatag

SEQ ID NO: 71 - protein, 466 aa, Nanoarcheum equitans
  Signal (1)..(16)
MKRFLPAVVVLGLALAAPTAQLEVIDYPNTVYTKGVMAKSTIPITIKYNTTDATNSKLIVYLINQNEKNLALMEEYKIDAGKTKIETIEIPLYNLPDYPNVDDGIYTIKFRLISFDNNGNTAADEKEINVSINEPFDVAQYDLDVLDLPLPEDKIVFTNTKTKFQIPIIYDGIANSDYVTVTLCAIANGIKLACNDTSKTLTTRENLVELVMNIPSFTGDGKLILSVKDNNGQNIVKEYAVKFVDGTLDVNVMPVSEKVMQGESTSIIVRVNNPIEKSRTVYLTIKTPTDTITKTIYLEGYSSAQLVIPIKVKTNSNKFNVYVYASDGVYTYSKQLTLDVVSKQDIINNIDVSYEKDKIELILYPKQPGVVTIKVLADGAIVDPSIKTISLDYKAKTVSFNYKPLKDTATIKFEVYDLNNNKIAEKQIKIVQKKAQQFNWLLPIAIIIALGLGLYLGRKKKEEIVE

SEQ ID NO: 72 - DNA, 285 bp, Nanoarcheum equitans
gtgaaacttaataagatagtagctttgttagatataattggtgatttattactatgtaagatgcgcgacaactattatatcgatatctattctgatgaaaattctattgttgtagaaagtgaggacttagttgtaacattgaaaaaatccaaaaatgataaggttttcataaaaatagaacaccctttgggggaatggcgcttttatgctaacaaaaaagagctagaagaaaatttaaaaaatacaaaattcgccaaattgtttgtcaaactaataaacctttaa

SEQ ID NO: 73 - protein, 94 aa, Nanoarcheum equitans
MKLNKIVALLDIIGDLLLCKMRDNYYIDIYSDENSIVVESEDLVVTLKKSKNDKVFIKIEHPLGEWRFYANKKELEENLKNTKFAKLFVKLINL

SEQ ID NO: 74 - DNA, 261 bp, Nanoarcheum equitans
atggcctttagccatactaaaaaggtaggtcctactggtaggtttggtcctaggtatggtttaggtataagaaaaagagtactaactgttgaaataaaacaaaggaaaaaacatgtttgtcccttctgtaggtctaaagcagtaattagagaggcatatggaatttacagatgtaaaaaatgcggaaaacaatttacaggtttagcctattacccatacgagcatttgcacgaatattacaaaattagaggggggcaataa

SEQ ID NO: 75 - protein, 86 aa, Nanoarcheum equitans
MAFSHTKKVGPTGRFGPRYGLGIRKRVLTVEIKQRKKHVCPFCRSKAVIREAYGIYRCKKCGKQFTGLAYYPYEHLHEYYKIRGGQ

SEQ ID NO: 76 - DNA, 201 bp, Nanoarcheum equitans
atgagaccattggagtttttagcttctttgaaaggcaaaagagtaaaggtttatttaaaaaatggcaaaaccattgaaggtttattggaaagctcggatatacatgttaatttatatatgaaagaggtaaaaattgatgaagagaatttgaaagaactatttgttaggggagatatggttttatttattgcccccctctaa

SEQ ID NO: 77 - protein, 66 aa, Nanoarcheum equitans
MRPLEFLASLKGKRVKVYLKNGKTIEGLLESSDIHVNLYMKEVKIDEENLKELFVRGDMVLFIAPL

SEQ ID NO: 78 - DNA, 654 bp, Nanoarcheum equitans
atggataggaaaattattgaagaaaaagcaaaaattgttgatgaaattccaaaagtaataaagggcaaagactatcaattaaagctaacaaatatggtattccatgttaggttaacttcctcaaaaccattagatttaagtaaagttgcagaggaaatggttaatgccatatatgaaaaagaccgattccctggggttaggctaaaactaaatgtgccagacgaaaatggggggatgcacacaatttctattctattatttagaaaaggcccaataatcgtttctggtgtgactaaaaaagagcatttgatagctgcaatagaatacgcttgtgacataataagaaaatatggcggagaatgtatagaagaaccagaaataaaattagaaaacatggtatggacaggctatctagattatgaagtaaacctagctttgttagcagaaaaagacccagatgctgagtataaccccgaacaattcccaggtttaacgtataggctaggcacagacaaaaaaggtagactacatttattcaaaaacggtaaaattgtagttccaggaaccagaagtgtggaagaaaccaaaaaaatcgttgaagaggtaatagaaagaattaaaaaatatggagtagcgaataagaaaagtgcatga

SEQ ID NO: 79 - protein, 217 aa, Nanoarcheum equitans
MDRKIIEEKAKIVDEIPKVIKGKDYQLKLTNMVFHVRLTSSKPLDLSKVAEEMVNAIYEKDRFPGVRLKLNVPDENGGMHTISILLFRKGPIIVSGVTKKEHLIAAIEYACDIIRKYGGECIEEPEIKLENMVWTGYLDYEVNLALLAEKDPDAEYNPEQFPGLTYRLGTDKKGRLHLFKNGKIVVPGTRSVEETKKIVEEVIERIKKYGVANKKSA

SEQ ID NO: 80 - DNA, 648 bp, Nanoarcheum equitans
gtgcatgaactagtttttgctttgatttctattttatttttatcattaattgcttttaaattttcttatttagagcaaaatgcttatactacgggttgtaaaatagaggatttgttaacaaaaaaccccttttcaggaattgttaagtctattcactatcaaattgaagaaacaaaagctaatttagattttttaaattggattattgggattaaaaaccctttgtctagtattagctatagaataacagttggtggttgccatatcttgtatagagaagtatcaatgaacgagttttacaaaatttataaagcctttctagagtacaaagggactggcgtatatttttatggtaaagtaattggcaattataaatttcctatagagattccaatttatatagctgaaataaaagatttgggcgacaaatataatatcactataacaaggaaaaatgttaatagcgattatctcaataataaaaatgttagcttagtttcgagcgacaaaatgttagacatattaataatgggatacgaagagaacaaaattcccttatatgctttagaattaaaaatagccgcaaaaattggagcgtgggctggggaaaaagttttagtggtatatgaagaaaataacccccattag

SEQ ID NO: 81 - protein, 215 aa, Nanoarcheum equitans
  signal (1)..(20)
MHELVFALISILFLSLIAFKFSYLEQNAYTTGCKIEDLLTKNPFSGIVKSIHYQIEETKANLDFLNWIIGIKNPLSSISYRITVGGCHILYREVSMNEFYKIYKAFLEYKGTGVYFYGKVIGNYKFPIEIPIYIAEIKDLGDKYNITITRKNVNSDYLNNKNVSLVSSDKMLDILIMGYEENKIPLYALELKIAAKIGAWAGEKVLVVYEENNPH

SEQ ID NO: 82 - DNA, 828 bp, Nanoarcheum equitans
atgatctcttttataagctatatacccttattgctagttttatacgatatttatagacattgggattcagaaaaatttttccattattttaatttattgttaggtacaatagcgataacaattactgctaaaatgatgttccatgtttatagggtatcccatatagacccatatgctttccctagtgggcacacattaatcgcttctgttcttttaatgttttacaaagatgtaaaactagtagtatttccattgttagtaggtttattaagagttatacttggaaggcatacaatagaacaaataattttgtctttcttatttataccaataatttattggtttgttagctttttggagagtaagggaaaagaaggcaatagaaagattttccatatagcgagcgctatggcgatagcttttatgttcgatgtttttaattctatagctttgtatgttttgtttgctttattgattatagggctaatactatacaagcataggaataacccaatagtaaaaaggtttttggattattacgatagagacggaaaaggaattggtgcatttactttagttttaggcagtataatatattattttatagaacccaaattaatggtttaccaagcatgggttgatggtttagctagtttaagcaaaaacatttgttttgttctattatatggttacataggttctattattggatttttagtaactaaaatgcctataggatttttgttcccaatagctgaagcgttaaccccttatgataatattttattgcctatactaatgggggttattttcttcatataccactaa

SEQ ID NO: 83 - protein, 275 aa, Nanoarcheum equitans
MISFISYIPLLLVLYDIYRHWDSEKFFHYFNLLLGTIAITITAKMMFHVYRVSHIDPYAFPSGHTLIASVLLMFYKDVKLVVFPLLVGLLRVILGRHTIEQIILSFLFIPIIYWFVSFLESKGKEGNRKIFHIASAMAIAFMFDVFNSIALYVLFALLIIGLILYKHRNNPIVKRFLDYYDRDGKGIGAFTLVLGSIIYYFIEPKLMVYQAWVDGLASLSKNICFVLLYGYIGSIIGFLVTKMPIGFLFPIAEALTPYDNILLPILMGVIFFIYH

SEQ ID NO: 84 - DNA, 1452 bp, Nanoarcheum equitans
atggatttggtaaaaaagattttagaccattatgaaaaaatatgggtactagcgaaagccaatgctgtattggaatgggattctgaaacttatatgcctaagggcgaaacaaaggagagaggatttataacatcgaaaatagaatcaatgatacaagatttaatgacagacaaagaatttattaaatgggttgaacaattagaagaaaaagcagagaacgattttgaaaaaggaatagcaagagtgttaaaaagaagtatatactattatacaaaaattcctaaaaaagagttagaagaatacaataagcttatagtagaagctgtaagggtatgggaagatgcaaagaaaaaatctgattttaacagatttgctccatatttagaaaaaatagtcgaatttaaaagaaagtttgctgaatatttgggctataaatattcaccatacgatgctttgttagatagatacgaagagggctatacagttaaagacatagatcccttatttaatagattaaagagggatttgaaaaaagaatacgaaagaataaaagagatttggcatgactatcattggttggaaaatgaaccatataatagagaaagaatggaattattgaataaaacagtattgtctatgattggttttgattttaaccatatgagattagatgttagcgcacatccttttactatagaattaggcctatatgatataagaattaccacttggtatcataaaaaagatttcagaaggtctcttttagcggtaatacatgagtttggccatgctttgtatgaaagacaaatagatgaaaagctatggaaaaccccattgcaagggggtgtatccctaggaatacatgaatcacaatctaggttttgggaaatagttgttgctaaaacaaaagagtttacccaattcttagagcctttagtaaagaatatactaaaaatagatgctgatagcgaagatctatttaagtatttcacaatagtaaggcctatcccaataagagttgagtctgatgatgtaacttataattttcatataatattaaggtacgaaatagagcgtgatttaatagaaggcaaaatcgatgttagggatattcctgaaatatggaatgaaaaaatggaacaatatttgggaataaaacctaaaaacgatagtgaaggggctttgcaagacatacattggtctttaggagcaatagggtatttcccaacatatactttaggtaatctaattgcagcacaaataaaatacaatttcccagacttagaaacacatatagaaaacaaaaactttgctacgattagagaatacttaagagaaaaaattcataaatacggctctatgtatgaaccaaaagttttgttagaaaaatcctttggagagcctgttaatgaaaaatattttattaaattgttaagagagcgctacagatga

SEQ ID NO: 85 - protein, 483 aa, Nanoarcheum equitans
MDLVKKILDHYEKIWVLAKANAVLEWDSETYMPKGETKERGFITSKIESMIQDLMTDKEFIKWVEQLEEKAENDFEKGIARVLKRSIYYYTKIPKKELEEYNKLIVEAVRVWEDAKKKSDFNRFAPYLEKIVEFKRKFAEYLGYKYSPYDALLDRYEEGYTVKDIDPLFNRLKRDLKKEYERIKEIWHDYHWLENEPYNRERMELLNKTVLSMIGFDFNHMRLDVSAHPFTIELGLYDIRITTWYHKKDFRRSLLAVIHEFGHALYERQIDEKLWKTPLQGGVSLGIHESQSRFWEIVVAKTKEFTQFLEPLVKNILKIDADSEDLFKYFTIVRPIPIRVESDDVTYNFHIILRYEIERDLIEGKIDVRDIPEIWNEKMEQYLGIKPKNDSEGALQDIHWSLGAIGYFPTYTLGNLIAAQIKYNFPDLETHIENKNFATIREYLREKIHKYGSMYEPKVLLEKSFGEPVNEKYFIKLLRERYR

SEQ ID NO: 86 - DNA, 255 bp, Nanoarcheum equitans
gtggtactgttcgagagagtaaggtctaccaaaacagtaagatgctactattgtggaaggatattgccaaaagagaaagcttatgtaatatacacaaaaccaaacgttgctggagagctttcagaaaatgaagttattgcagtatttagccaaaaaagaaaaatatatgtatgtccaagctgtgcaaggcatagaggtataaaagaccataggaaagaggtcaatgtgaacaaattatacaaactggtattttaa

SEQ ID NO: 87 - protein, 84 aa, Nanoarcheum equitans
MVLFERVRSTKTVRCYYCGRILPKEKAYVIYTKPNVAGELSENEVIAVFSQKRKIYVCPSCARHRGIKDHRKEVNVNKLYKLVF

SEQ ID NO: 88 - DNA, 573 bp, Nanoarcheum equitans
atggaaatagctcggggaagtgaaggaataatatatttagactataacgattctttaggaataggcaaaaaaccttacataataaaatataggcctcctaaaaaatatagacatgaaaaaatagatatttctcttagaaagtttagactaagaagagaatacaaaatattgcaaaaagcttacaaaataactaatactccagagccctatcttatggatgaaaacaaatttataattgctatgcaatatattgaaggccaacccttaaatgtgagcaattttgtccattatctaaaacctatggccttaattattaatactttgcatgaaaataatattatacatggcgatttgcatccaaaaaactttatattgggagataaactatatataatagattttggtctgtcctttatttctaatagagtagaagacaaagctgtagatttgtatgaattaagaaaattgctaaaagatagatgggaagaatttgcccaatattataaaaatgatgaagttttgaaaagggtagaagacatagaaaggagaggcagatataagatgcaaatataa

SEQ ID NO: 89 - protein, 190 aa, Nanoarcheum equitans
MEIARGSEGIIYLDYNDSLGIGKKPYIIKYRPPKKYRHEKIDISLRKFRLRREYKILQKAYKITNTPEPYLMDENKFIIAMQYIEGQPLNVSNFVHYLKPMALIINTLHENNIIHGDLHPKNFILGDKLYIIDFGLSFISNRVEDKAVDLYELRKLLKDRWEEFAQYYKNDEVLKRVEDIERRGRYKMQI

SEQ ID NO: 90 - DNA, 1227 bp, Nanoarcheum equitans
atgattattatagcggaaaaaccctcggtagcaaaaagaataactttttcccttactacaaattataagctaatatcaaaaaatcccccccaatattattttaaaatagatagcaaacccgttattgttatacctgcagcaggccatatatataatttagatacaaaccaaagaggttatccagtatttgattatttttggaatgtagaaaaaggtaaaacaaaatttgctaaagcattttcaaaatataaaaacgaaaaagaagtaatagttgcaacagactatgatttggaaggagagctaattggttataatatattgaggtttgctctaaacaaaaccaatgcgaaaagaatggttttctctgcattaactccaaaagatcttagggaagcattttttaatctaagagaatctatagacaaaaacttagcaatagcaggagagactagacatataatagattggctttatgggattaatttgtctagagcattaacttatgctttaaggcattatgttaaagatgtaaccttaagcattggccgtgtgcaggggccaactttaagattagtatatgagagagaaaaagagatatctaatttcataccagaagagtattatagagtagtatttatacacaaaaactacaaattttactatatagagaagcttaaaaatttagaaagggccaaagagatagccaaatgcaaagaattaaaaatagtaagagtaaaagaggaaaaagtttatttgcctcctccacatccatacaatttaagcgctatacaacaggatgcatacaaattctataaaatatcgcccaaggatactttgttaatattgcaaaaactatatacaaatggctatataagctatcctaggactagttcaaatatattgccagagagcttagactatagatatatactagaaaaactaaaattgtggggttatagttattacataagttatttgcttaaaaaacccatcctaaagccgaacaatggtaatatagaggatgcccatcccgctatttatcctactggtataatccctaaagggttatcaaaaaaagaaagccttatttatgatttaatagttagaaactttattgccacttttatggacaaagctttaataataaaatttaaagtctatgggagatgcgataaatatttatttgtatacgaaggacaatcctatggaaatagctcggggaagtga

SEQ ID NO: 91 - protein, 408 aa, Nanoarcheum equitans
MIIIAEKPSVAKRITFSLTTNYKLISKNPPQYYFKIDSKPVIVIPAAGHIYNLDTNQRGYPVFDYFWNVEKGKTKFAKAFSKYKNEKEVIVATDYDLEGELIGYNILRFALNKTNAKRMVFSALTPKDLREAFFNLRESIDKNLAIAGETRHIIDWLYGINLSRALTYALRHYVKDVTLSIGRVQGPTLRLVYEREKEISNFIPEEYYRVVFIHKNYKFYYIEKLKNLERAKEIAKCKELKIVRVKEEKVYLPPPHPYNLSAIQQDAYKFYKISPKDTLLILQKLYTNGYISYPRTSSNILPESLDYRYILEKLKLWGYSYYISYLLKKPILKPNNGNIEDAHPAIYPTGIIPKGLSKKESLIYDLIVRNFIATFMDKALIIKFKVYGRCDKYLFVYEGQSYGNSSGK

SEQ ID NO: 92 - DNA, 669 bp, Nanoarcheum equitans
atgtggtattccatagcaatatttattatctatcatttaataatttttcacttatataaggtattttattattacaacataaagccttgtatgatgctacttgttggtttaggtggtttaggctctttgctagcatactatttaagagttctgtataaaaaatggtttgttgttttggacaaagatattgttgatgagagcaatataaaataccaccccttttataataaaaaagatttgggcgagtacaaagctaaaatagtgggtaatagattgggtttgccttacataatatctgacataaaagatatagatctttctccttacaaaattgtaatagaagctttagataattggagggatagaaaatatttaataaaaaagtctaaagagttaggttttattctaatacatactgcggttagcgaagacaagggagaattggccataattaaagaaagccacgattattttctaaaattcgaaggagaagggcatgccagaaattatatgcctttaatattttctcctattgcggcatggtttatcgataattattaccaatattttgacaaatttgtaatttttaaggattgggaaataactatattaaatgcgaagcgtgtccctaactttaaacacaatagtaatgatagctttggcgattag

SEQ ID NO: 93 - protein, 222 aa, Nanoarcheum equitans
MWYSIAIFIIYHLIIFHLYKVFYYYNIKPCMMLLVGLGGLGSLLAYYLRVLYKKWFVVLDKDIVDESNIKYHPFYNKKDLGEYKAKIVGNRLGLPYIISDIKDIDLSPYKIVIEALDNWRDRKYLIKKSKELGFILIHTAVSEDKGELAIIKESHDYFLKFEGEGHARNYMPLIFSPIAAWFIDNYYQYFDKFVIFKDWEITILNAKRVPNFKHNSNDSFGD

SEQ ID NO: 94 - DNA, 375 bp, Nanoarcheum equitans
atggaataccacatagagttagcatttacgaaaaaaatagatattccaaccctaatgttgttagtaaacctattaaactctatgaaaaatattaacaaagtaacaattattgagagcgaattaatagaattgtacagaaaaaacggaaaaataaagaaacttactatggaagatgtggaggaaaagcttaatattcctttttataggaacttgtatacattatctagaattgccgatgaaaaaaggtttagtgggagcgctgtttataatggtaaaagtatattaatcatacactctcaaggtatagatgattattatagcggaaaaaccctcggtagcaaaaagaataactttttcccttactacaaattataa

SEQ ID NO: 95 - protein, 124 aa, Nanoarcheum equitans
MEYHIELAFTKKIDIPTLMLLVNLLNSMKNINKVTIIESELIELYRKNGKIKKLTMEDVEEKLNIPFYRNLYTLSRIADEKRFSGSAVYNGKSILIIHSQGIDDYYSGKTLGSKKNNFFPYYKL

SEQ ID NO: 96 - DNA, 798 bp, Nanoarcheum equitans
atgcgaagcgtgtccctaactttaaacacaatagtaatgatagctttggcgattagcgttttttccatattatttattgttctatccaaaacacagaaatcaacaaactatattttgggttctcaaaaaattgttgtaacagatgtagctaaattagaggaaacccgtaatatatgtaaatctttatgcgaaagggcgaaactattagattttcttagctccacatattgcaataagaaattcgaattaaaaataattgaaaataacgaaactgttaataaattgttctattgctggcaacccccaataaatgtgaaatgtgaattctccaaaagcattcctggagaaggaatctatttttattatgaaagcgataaatgcgaatacttctttataagcgataccgaattaaataggctaaaaagccaatatttatataaaatgaaagagctaacagtcaatgatttgtataatgataataactacgaaaacaaaataactatcgataagcccttaccaactctaaaaataaaggaattggatgattacaattttaatatagaatgccagttaatttctgaattcgacaacaaaaatattgatagtcaaactaaatatgtgttattctcggcaaaactaaaaattaatggcaattacaatgggaatgacataaacatagaaggctattacccaataacatggaaggttttgcctaataatccaaacataaaacaatatattatagattatttttccaatttttgctctttgttgatacaatatataaaatatgaataa

SEQ ID NO: 97 - protein, 265 aa, Nanoarcheum equitans
  signal (1)..(29)
MRSVSLTLNTIVMIALAISVFSILFIVLSKTQKSTNYILGSQKIVVTDVAKLEETRNICKSLCERAKLLDFLSSTYCNKKFELKIIENNETVNKLFYCWQPPINVKCEFSKSIPGEGIYFYYESDKCEYFFISDTELNRLKSQYLYKMKELTVNDLYNDNNYENKITIDKPLPTLKIKELDDYNFNIECQLISEFDNKNIDSQTKYVLFSAKLKINGNYNGNDINIEGYYPITWKVLPNNPNIKQYIIDYFSNFCSLLIQYIKYE

SEQ ID NO: 98 - DNA, 1623 bp, Nanoarcheum equitans
atggatagagaaaaagcattacaaatagtggaaaaatttaaaaaagaattaccagttgtaggcgcagctataatacctaataatttaccaactttcgagagatatattaaatctctagtagaagagggttatttattagaaaaattcgttgacgaagcgaagagtaagccccatttaattatattaataaaagattttgagaaaccaaatgaaataaaaaagaaaactgctgaagtattatacgaagtagccaaagagaggcccccattttgggttttgcctttgttagttaaagaaaatttctttaatttattgtctagaacaggtttcctagaaataatgccttacatagatgttttgttcgatgaaatatatttgcaagcagcaaaatttggggggctatatttatatgcattagccagaaggttaggcgatggattagttgcatttgttttagccggctccgcagcgagaggagaatacaaagagaatagcgatatagactttttcgtaatatatgatgatactataatacataaaccagtaaggcatgaattattgttgttggtagaaccttttaggattaccgcaggaatagaaagacgtgttaatatacaggtttattctttgtcttctttttgggatagccttagacaaacgaacccagtaataataacattcttaagagacggggttccattgtatgataggagagaattcactatatggaaaaccttattaaaagaaggccacatagtaccaacaaaagaagctgcagaacaacaattagtattagctaaagccaaattagaggagatgaaaaagaaaatggttgattttgttattgaagatagtttttgggcatcaattgctgcagcacaatcattattattagcaataggtgttataaccgttactccaaaagaaaccataggagagttaagaaaactgggttataatgaattagcagacataatagaacaaatctataatagaaggaaagagatagagcatagcgatcaagaggttaaaattgatggcaaagaaatagaagaaaaatatttgttagccaaaaaagttgtcgaaaatgcagaaaaggaaatgcccaaactagagattgttggtatgaaaagagaagtagaagcattaaaaacagaaatagaagctttgttaatagaaatagaaaaaacagttccaaaattattcaatgaattgattgagaagggccatataagtaaggaacaattagaattattgaaaaagccattacccaacagtttatccgaattggaaaaaataaagaattctctatgggatttgtatagaaagttaagcgttattagggaaattagggatactcaatatttgttccatggcatattagttagatataaggggaaagagtatattttgctaaaagcggacaaatattatttgtatgactctaacgaagataaagtctatgttgtaactgacgaaggcctaaaagaagggaacagagacgaattagatgaaaaactagaagaaataactgaagagagagtgcctatcccaatagaggatctaataaaaataaaacaaatacttggagatgtagagatattaattagtaccccatattag

SEQ ID NO: 99 - protein, 540 aa, Nanoarcheum equitans
MDREKALQIVEKFKKELPVVGAAIIPNNLPTFERYIKSLVEEGYLLEKFVDEAKSKPHLIILIKDFEKPNEIKKKTAEVLYEVAKERPPFWVLPLLVKENFFNLLSRTGFLEIMPYIDVLFDEIYLQAAKFGGLYLYALARRLGDGLVAFVLAGSAARGEYKENSDIDFFVIYDDTIIHKPVRHELLLLVEPFRITAGIERRVNIQVYSLSSFWDSLRQTNPVIITFLRDGVPLYDRREFTIWKTLLKEGHIVPTKEAAEQQLVLAKAKLEEMKKKMVDFVIEDSFWASIAAAQSLLLAIGVITVTPKETIGELRKLGYNELADIIEQIYNRRKEIEHSDQEVKIDGKEIEEKYLLAKKVVENAEKEMPKLEIVGMKREVEALKTEIEALLIEIEKTVPKLFNELIEKGHISKEQLELLKKPLPNSLSELEKIKNSLWDLYRKLSVIREIRDTQYLFHGILVRYKGKEYILLKADKYYLYDSNEDKVYVVTDEGLKEGNRDELDEKLEEITEERVPIPIEDLIKIKQILGDVEILISTPY

SEQ ID NO: 100 - DNA, 693 bp, Nanoarcheum equitans
atggagcaaacattaattataaaatctggcaaatgtgcctggggcaaatgcatattttgtgggtggggaaaaaaggaataccctaaaaaaacttttgaagagctaaaggaatttacagaaaaacatgtaaaagatggcataaaaagattgaaaatttatgtttctggtagtgtgttggatgaaaaccaaataccatttgagtatattaaatggttatacaaatttgcaagcgagagaaatataaaagaattggttttagaaactttaccccaatttctaagtgaggagaaagcaaaagagttagaaaatctatcgaagcaatataacattactacatatttagctataggcctagaggcggcagatgatgaattgctaaaaaaactaaataaaccatttaggttaaaagattttgaagaattcgttaatagggctaaaaagcataacttaaaattaagggtttatttgttagttaatattcccgccaattatgactatttagagaaaagtgtagattatctaaaagataaagcagacgagatagttttaataaatttatatccccataaggacagcgctatgatatatttatggttgcaatgctttaggaacaggctttacgattatataaaggacaatagagaattgctatcaaaatttgccagctattacgaagctaatatggggtactaa

SEQ ID NO: 101 - protein, 230 aa, Nanoarcheum equitans
MEQTLIIKSGKCAWGKCIFCGWGKKEYPKKTFEELKEFTEKHVKDGIKRLKIYVSGSVLDENQIPFEYIKWLYKFASERNIKELVLETLPQFLSEEKAKELENLSKQYNITTYLAIGLEAADDELLKKLNKPFRLKDFEEFVNRAKKHNLKLRVYLLVNIPANYDYLEKSVDYLKDKADEIVLINLYPHKDSAMIYLWLQCFRNRLYDYIKDNRELLSKFASYYEANMGY

SEQ ID NO: 102 - DNA, 642 bp, Nanoarcheum equitans
atgaaggttaaaatattaaaaagggaatttatagataaagaccattatttgctatgggtagaaaggcccaaagattataattacaaaccggggcaatttacatatattgaaagtacaataaacaataacaaggtaagaaggttttattctttcgcttcccacccagaagaagaaaacctattgttttacattaaaagagtacccaatggtttgatgtccaattatttagctgaaataccattaggttcaacaatagaaataggtaaccccatgggacatttcactttagatagggcagatacggatagagttatttttataggggctggcacaggtatagccccaataaggccattaactattgaagcggtgaaacaaaataaaaaagttattgttgtacaccaagaaaggtataagcatttgttagtttttagagatttgtttgaacaattgcctataatatatattcctatattatctaaagaacaatccgaataccatgggcatgtacaagattacatagatcgcctaatatataatgatgcaacctattatatatgtgggtcgagacaattcgtaatagaaattgctaacctattaaaaagcaaaggcataaataaaatagtaattgaagctttctaa

SEQ ID NO: 103 - protein, 213 aa, Nanoarcheum equitans
MKVKILKREFIDKDHYLLWVERPKDYNYKPGQFTYIESTINNNKVRRFYSFASHPEEENLLFYIKRVPNGLMSNYLAEIPLGSTIEIGNPMGHFTLDRADTDRVIFIGAGTGIAPIRPLTIEAVKQNKKVIVVHQERYKHLLVFRDLFEQLPIIYIPILSKEQSEYHGHVQDYIDRLIYNDATYYICGSRQFVIEIANLLKSKGINKIVIEAF

SEQ ID NO: 104 - DNA, 1077 bp, Nanoarcheum equitans
atggatgaaaaagagaaatacaaactaaaatccctcttaagacaattaaaaagcatagaagggcggggtacagaattggtttccctatatataccatctaactatcctataggaaaaatattagaccaattgaattacgaatacgctactgctgcaaacataaaagatgatactactagaaaaaatgtacaagcagcattagctaaaataataaactatttgaaagattttaagaaaatccctgaaaatgggttagtaatttttgctggcaacatagcagggaggggcgaccaagatgttagactatgggctattgtacctccagaaaaaagtaacctaaaactatatagatgtgattctaaattttatgtagagccattagaagaaatgttagaagagaaaaaactatatgggatagtaactatagataaaggagaagcagcaataggtttaattaaagggcgaaaacttatagttttagacgaattcgaaagctgggttccaaggaaacaccataaaggagggcaatccgcccgaaggtttgaaaggctaatagaccaagccacacaggaatggttgcaatatgttgcggaaaaagcgagacaatatttcgataaatacaaagacaaaatacaaggtattattattggaggatctggtttcgctaaacacgattttatcgaatatttgccttattattataaagacaaaataattgctattgtagataccggttatagcgatgcctatgggttaagagaagctttatatagagcagaagataaattaaaagaattggaaatagaaaaagagagaaaaattttatcagatttgtttaaagctatagcattgggtagaaaagacatcgctttaggatatgaagaagttaaaaaatatttggaacaaggactagttcaaaaaataattgttatggaggattttcccaaattggatgaaatattggaattggcagaaaaacataatgtagatgtagaaataattgaaggaggaacaacagaagcagaacaatttagaccaattggtatagcagcttttctatattacgcatcagagtag

SEQ ID NO: 105 - protein, 358 aa, Nanoarcheum equitans
MDEKEKYKLKSLLRQLKSIEGRGTELVSLYIPSNYPIGKILDQLNYEYATAANIKDDTTRKNVQAALAKIINYLKDFKKIPENGLVIFAGNIAGRGDQDVRLWAIVPPEKSNLKLYRCDSKFYVEPLEEMLEEKKLYGIVTIDKGEAAIGLIKGRKLIVLDEFESWVPRKHHKGGQSARRFERLIDQATQEWLQYVAEKARQYFDKYKDKIQGIIIGGSGFAKHDFIEYLPYYYKDKIIAIVDTGYSDAYGLREALYRAEDKLKELEIEKERKILSDLFKAIALGRKDIALGYEEVKKYLEQGLVQKIIVMEDFPKLDEILELAEKHNVDVEIIEGGTTEAEQFRPIGIAAFLYYASE

SEQ ID NO: 106 - DNA, 1266 bp, Nanoarcheum equitans
atgaaaatatatatagaggggtttgacgagaaaggctatggagtgggcaataatatacatgttccatttgcttaccctggagatatagtagaggtaaaagttagaaggaaagggaaaaagaaaattggggaaatagtaaaaataattgaggaaagcccttataggacatccaataaatattgtgcccatttaggaaaatgtggtggttgtctatggggattaatggattaccaataccaattggaatttaagaaaaaagttatagaaaatttgtttggctatgataaagatattattccttcgccaaaaactatctattatcgaaataggatggattaccctatatataataaggtttccttaaaagagcctggcaaatggtatggttatattccaataaaagaatgcaaaatgctttcaaaagaagcagaaataataataaatgagtttaacaaattcatagaaaaatacaaaatacctagttgggacacagttaagcacacaggttttcttagatatttagtgataagggagggcaaatttactaaagaaaggatgatccatataataacatataaaagaaagaaatttgaggaattgtgggattttatcgaaaacataaaagatttggttacttcagtatattggggaattagagaggatttaggagatgtatcaataagcgaaaaactttaccattattatggaagcaaatttttgagagaacgaatattggatatagaatattacatatcgcctaatagcttttttcaaactaattcctaccaagctgtaaacttagtaaaaatagtaaaggaatttttagaaccctctgaaaatgatgttgttttagatttgtatagcggggttggattgttttcattgcaaatagctaatgaagttaagaaagtaattggtatagaaattgtggaagaagctgtagagatggccaaactaaatgcctctataaacaatatagatgcagaatttattgcttcgcctgtcgaaaaagctccaataataaaggctaacaaaataattgtagacccaccaagagcaggtttaacaaataaggctatagagtatatcgaaaaaataaaccccgatactatagtttatgtttcatgcaatccttatactcaaaaaagagatataaataaattgaaaggttataaaataattgacatgcaacctttagatatgtttcctaatactccccatatagagaatgtaatattaatgaagaagtcgaggacaactgattaa

SEQ ID NO: 107 - protein, 421 aa, Nanoarcheum equitans
MKIYIEGFDEKGYGVGNNIHVPFAYPGDIVEVKVRRKGKKKIGEIVKIIEESPYRTSNKYCAHLGKCGGCLWGLMDYQYQLEFKKKVIENLFGYDKDIIPSPKTIYYRNRMDYPIYNKVSLKEPGKWYGYIPIKECKMLSKEAEIIINEFNKFIEKYKIPSWDTVKHTGFLRYLVIREGKFTKERMIHIITYKRKKFEELWDFIENIKDLVTSVYWGIREDLGDVSISEKLYHYYGSKFLRERILDIEYYISPNSFFQTNSYQAVNLVKIVKEFLEPSENDVVLDLYSGVGLFSLQIANEVKKVIGIEIVEEAVEMAKLNASINNIDAEFIASPVEKAPIIKANKIIVDPPRAGLTNKAIEYIEKINPDTIVYVSCNPYTQKRDINKLKGYKIIDMQPLDMFPNTPHIENVILMKKSRTTD

SEQ ID NO: 108 - DNA, 411 bp, Nanoarcheum equitans
atggacatattaaaatatttcaagcttttgctcgccgcgatattgtctattctaataatcctaataatatttaaactgctttattatatagcatttttgttgtatactaacccgttttcaagatacgaagcagtaaacataaaaaacatgcttggagacattctattagttttagttttaatagagcttttgagaacggttttgatatacataaaaaatcaagatttgtatttagatgccttagttgaagccgcttttatcgctgtgcttagaaaaataatattgatagaagttgagaatccaaatccatggtatatctttgccattactgctctctttgttagtagtgctataatatatagacattggttttacaaggtctattctatagacagtgggaacaaagaatag

SEQ ID NO: 109 - protein, 136 aa, Nanoarcheum equitans
  signal (1)..(36)
MDILKYFKLLLAAILSILIILIIFKLLYYIAFLLYTNPFSRYEAVNIKNMLGDILLVLVLIELLRTVLIYIKNQDLYLDALVEAAFIAVLRKIILIEVENPNPWYIFAITALFVSSAIIYRHWFYKVYSIDSGNKE

SEQ ID NO: 110 - DNA, 1374 bp, Nanoarcheum equitans
gtgctatacttatacaacacattaacttcgagaaaagaggcatttattccattggaagagccattcgtaaaaatgtatacctgtggggttactccttatgataaagcacatgtgggacatttaagaacttatttagttacggatttgttaagaagaatactaagatttttgggctattatgatatagcagtaaccaattttacagatatagatgataaaataataaaaaaatcgcaagaattaaataaagattggaaggaaattgttgaagaaaacattaaatatgtgttcgatgttctaaaagaactaaaagttttgcccttctacgtttatccaagggttacttaccatatagatgatatagctaatgcggttaaatctttattagataggggttatgcatacaaaggaaagtatagcatttattttgatgtagataaatatccatattatggtcaattatccggaataaaaagcaaaaaagaatgggaacaagaaaagcatttattagaagataagaaaaacccatatgattttgctttatggaaatttaaacaaccaggcgaaccatattggaatactattgtaggggaaggtagacctggttggcatatagaatgttctgttatgtcttccaaatatttaggagaaagatttgatatccatttggggggaagtgatttgatatttccacatcatgaaaatgaaatagcgcaaagcgaaaccttatataatgtgcatccatgggttagatattgggtccatattgggatggttcaaataaatggagaaaaaatgtctaaaagtttaggaaatataattgaggctaaagaatttatcaaaaagtacaaacccgaatttgtaaggtttttcctattgtctacccattataggaaaccattggatattagcgaagaaaatatagagcaagctcaaactatttacaaaaaattgaccgatgcttacaataccgctaaaagtattgttgaaaacgaagtttcctataggtttgacaaagatgtaagaattatattagattattatagagagatgattaaagcgtttttagatgatatgaatacgccaacagcaatagcgagcctaaacaaaatagtttccatttttaatcaaaatccagaataccctatagcttatttaacattgagggcattcgaagatttcaatagaataatgaatgtgtggtttgaaaaaccaatagatttagatataattaacgaaataatagagattagaaacatgttaagaagagaaaagcaatatgaattggcagacaaaataagagatatattacaaaagaaaggtataaaaattaaagattacaaagataaaaccgtctggtatgccgatatttaa

SEQ ID NO: 111 - protein, 457 aa, Nanoarcheum equitans
MLYLYNTLTSRKEAFIPLEEPFVKMYTCGVTPYDKAHVGHLRTYLVTDLLRRILRFLGYYDIAVTNFTDIDDKIIKKSQELNKDWKEIVEENIKYVFDVLKELKVLPFYVYPRVTYHIDDIANAVKSLLDRGYAYKGKYSIYFDVDKYPYYGQLSGIKSKKEWEQEKHLLEDKKNPYDFALWKFKQPGEPYWNTIVGEGRPGWHIECSVMSSKYLGERFDIHLGGSDLIFPHHENEIAQSETLYNVHPWVRYWVHIGMVQINGEKMSKSLGNIIEAKEFIKKYKPEFVRFFLLSTHYRKPLDISEENIEQAQTIYKKLTDAYNTAKSIVENEVSYRFDKDVRIILDYYREMIKAFLDDMNTPTAIASLNKIVSIFNQNPEYPIAYLTLRAFEDFNRIMNVWFEKPIDLDIINEIIEIRNMLRREKQYELADKIRDILQKKGIKIKDYKDKTVWYADI

SEQ ID NO: 112 - DNA, 1035 bp, Nanoarcheum equitans
atgccgatatttaaaaatagattcgtctttagcgaagcgtatgtaccatctaaaatattacatagagatgacgaaatatctttgatatatactgcaatttccccaataaaacaaggagaaaaaccattaaacatatttatttatgggcaaaccggcacaggaaaaacattagttaccaaatatgttttatcaaaaataggagattacatatatattaattgcaagtttgctggcataacaaaaaggatagaaagctttattagggaattctctttacaattaggccaagatttttatgatttgaccgatgttatacaatatataagagataaaaaattaataattgtgtttgatgaggttgaccaactatcaaaagatttgggagacgaaatattatatacttttacgagagccccaggaaatattggaattataggtatttcaaacaatatattttttgttgataggctcgatccaagggttagatcttctttaagcgaattagagatattattcaaaccatacaatgctttgcaattaagagatatattattggaaagagccaaagagggattatacgaaaatagttatgatttggcagcgatatcatacatagcagcagtcactgccagggaatacggcgatgctaggagagcaattaatttattaagattggccggagaaattgcggagcgtaaaggtaaaaataaaatagaattggaagatgcaaaagaagctatagaattggaagagaaagataaagtaaaattcgttattgaatctttgcctttgcaatccaaattagtattaaaatctattgctgaactaaaagacacaacattgggaaaagcttatgaactatattatagaaaaagcttagaaaaaagtgttactcccattacatttagaaggtttgtagaaatagtaaacgatttagaaactttaggattagtatcaattgattttgctttattaaatgggaaaagagttagaaaggtaaaaacctttattagtccgaaaattattgatctataa

SEQ ID NO: 113 - protein, 344 aa, Nanoarcheum equitans
MPIFKNRFVFSEAYVPSKILHRDDEISLIYTAISPIKQGEKPLNIFIYGQTGTGKTLVTKYVLSKIGDYIYINCKFAGITKRIESFIREFSLQLGQDFYDLTDVIQYIRDKKLIIVFDEVDQLSKDLGDEILYTFTRAPGNIGIIGISNNIFFVDRLDPRVRSSLSELEILFKPYNALQLRDILLERAKEGLYENSYDLAAISYIAAVTAREYGDARRAINLLRLAGEIAERKGKNKIELEDAKEAIELEEKDKVKFVIESLPLQSKLVLKSIAELKDTTLGKAYELYYRKSLEKSVTPITFRRFVEIVNDLETLGLVSIDFALLNGKRVRKVKTFISPKIIDL

SEQ ID NO: 114 - DNA, 546 bp, Nanoarcheum equitans
ttgaaaaggctaggaggtaaaattctattttatatttcagttttcgttctttcattctatgctggattaagattatttaacaaaaaagggaaagctcctacaatattggaaaacaatgtagaaactaatatgttatatttcgatcccattacaaatcaaaaaggttatatagaatataaagatacaaaagaaaattatacattaaaactaaattattcctatgttttgggctctatagtttacgatggctatttatatacaaaaaaaggctccttccatataaaagggcaaatttccaataaagcggaagcgaaaataaccaatttagaaaaaaacacttctaaaaaactgcaattcggttggaatttgtatgaaatgatattctatgtaaacaaattgctatccaaaaacgatataaaagtaacagaaaaccaatttgaaggcataatgaatggcactattattacaaaagaaaaatgttttgtttataatttatcaaatgcgacaatccattattacaaaaaggcctgccttatagatcaataa

SEQ ID NO: 115 - protein, 181 aa, Nanoarcheum equitans
MKRLGGKILFYISVFVLSFYAGLRLFNKKGKAPTILENNVETNMLYFDPITNQKGYIEYKDTKENYTLKLNYSYVLGSIVYDGYLYTKKGSFHIKGQISNKAEAKITNLEKNTSKKLQFGWNLYEMIFYVNKLLSKNDIKVTENQFEGIMNGTIITKEKCFVYNLSNATIHYYKKACLIDQ

SEQ ID NO: 116 - DNA, 432 bp, Nanoarcheum equitans
gtggtaccaaatgggttattcgctggtaggaaattgaaaaaaataaggaaaaaatttagatggaatgactataggtatgtaagaaggatgcttagaataaaagagaagtatgacccattagaaggggccccaatggcatctggtatagtattagagaaaaccgatgtagagagaaggcagcctaattccggtagaattaaagtagttagagtacaactaaagaagaatggcaaagtagtaacagcgtttactcctggagatggggctataaaagttattgacgagcacgacgaagtattaatagtcggtataagaggtaggcaaggcagatctatgggagacataccgggagtaagatataaagtatacctagttaatggacaaccattagaattgctaagaaaaggtaaaattgaaaaggctaggaggtaa

SEQ ID NO: 117 - protein, 143 aa, Nanoarcheum equitans
MVPNGLFAGRKLKKIRKKFRWNDYRYVRRMLRIKEKYDPLEGAPMASGIVLEKTDVERRQPNSGRIKVVRVQLKKNGKVVTAFTPGDGAIKVIDEHDEVLIVGIRGRQGRSMGDIPGVRYKVYLVNGQPLELLRKGKIEKARR

SEQ ID NO: 118 - DNA, 1794 bp, Nanoarcheum equitans
atgactatagtagtacctgatacctctgcgcttatagaaaaggctatatctaaaatgataaaagaaaacaaaatcaaaccttcaaaaatagttatacataacgctactatcgcagaattggaacatcaagccaatgaaaatagagaaataggttatttaggattagaagaaatcgaaactctaaaagagatggccgaccaatatgggtttactgtagagttccaaggggaaagaccaaaagctgaagaaataatactggcaaaaaaaggagagatagataataaaattagagagttggctaaacaattgaatgctatattaattactgcagatagaacccaatattatgtagcaaaggttttaggaatccaggcaatatttttagaaaagccaaaaagagaaaaattgttgtttgagcaatattttgatgaaaatactatgagtgtacatttaaaagagggcttgcccccattggccaaaaaaggaactcctggtaaatgggagttagttagaataacggacaaacctttaacaaaaaacgatttagaagaaataataaaagagatcgctgaagaagctgttagcagagaagattcttatatagatattgagggcgaaaacattttagtagcacaaataggcaaatacagaattgtagcggttaaacctccattgagtgatgcaatagaagtaactatagtaagacccgttaagaaactatccttagaagattataaaattagagaagaattattagaaaggctaaaagaaaaagctcatggtattttaatagctggtgccccaggtatgggtaaaaccacattcgcccaggcattggctatgttctatgtaaaattaaacaaagtggtaaaaactatagaatccccaagagatatggatttgggaaaagaagtaacccaatattctttaactcaaggcaaaacccgagaaatatatgctttactattattagctagacctgattatgttttgtttgatgaagttagaacagaaagagatatcaaattgtttgcagatttaagattagcaggaataggaatgataggagtaatacatgcaaatagagcgatagatgctatacaaagatttataggaaaaatagaattgggtgtaatccctcaagtagttgacactgttatttttatagataagggccaaatagccaaagtatatacattagatatggttgttaaagtccctactggaatgaaggaagaagatttggcgagacccgtaatagaagttagagatctatatacaggcaaattggaatatgaaatttatgtttttggagaggaaactgttgtaatgcccatacatggcgagcaaatgccaaatgctttagcgagattggcaaaaatcgctatagagaatgaaataaagagatttctaaaaacagatgtaaaagtagaaatagagtccccaaatagagttacagtttatgttccaaaagggtatagaaagagactagtaggaaaaaggggaaaaacaattgaaagctttgaaaaaatgttgggtgtaagaataactgtaaaagagataggcgaagaagagccagagtttaacataaaggaaacaaacaaatatctaataatagagttacccccagaatattatagaagggttgtaactattctaatcaatggaagaccctttgtagacgctatagtagggaaagatggaaaaataaaaatcgctaaaaatagtgatttaggtaaagtactatacaatgctctaaaaggtggagcaaaaattgatatagagcttaaataa

SEQ ID NO: 119 - protein, 597 aa, Nanoarcheum equitans
MTIVVPDTSALIEKAISKMIKENKIKPSKIVIHNATIAELEHQANENREIGYLGLEEIETLKEMADQYGFTVEFQGERPKAEEIILAKKGEIDNKIRELAKQLNAILITADRTQYYVAKVLGIQAIFLEKPKREKLLFEQYFDENTMSVHLKEGLPPLAKKGTPGKWELVRITDKPLTKNDLEEIIKEIAEEAVSREDSYIDIEGENILVAQIGKYRIVAVKPPLSDAIEVTIVRPVKKLSLEDYKIREELLERLKEKAHGILIAGAPGMGKTTFAQALAMFYVKLNKVVKTIESPRDMDLGKEVTQYSLTQGKTREIYALLLLARPDYVLFDEVRTERDIKLFADLRLAGIGMIGVIHANRAIDAIQRFIGKIELGVIPQVVDTVIFIDKGQIAKVYTLDMVVKVPTGMKEEDLARPVIEVRDLYTGKLEYEIYVFGEETVVMPIHGEQMPNALARLAKIAIENEIKRFLKTDVKVEIESPNRVTVYVPKGYRKRLVGKRGKTIESFEKMLGVRITVKEIGEEEPEFNIKETNKYLIIELPPEYYRRVVTILINGRPFVDAIVGKDGKIKIAKNSDLGKVLYNALKGGAKIDIELK

SEQ ID NO: 120 - DNA, 555 bp, Nanoarcheum equitans
ttgaaatttatcttaatggtttggctgtataaaattttaacaacccttgaaaaaaagctgtataataatataaataaattggaatatgcaggcgcaaacgatataaataatatggttgcattgcaataccaaacatcggatatggatttagaagtttatttgaaaaaagacaatttttatgccgttactaaaaagggcttagataaatccacaatactcaaaaaaatagaatatacaaaactatttccattttttgacaatagaacgccattagaaagagaaatagaattggccgattgggtaaaagaaatgatagtaaacaggtttttatataacattagaaccgatacaatggggattagaaatgaagacgatttaataatagcgtacaaagccggcaaattcgttttaccaatctattttcaattatatataagaccaacggatgaaggttataaagagattagagaacttttagaaaaaaacggattgaaaaggggaaaatatagggtaatacccatgccattattaaaatttttaaaagagagagaataa

SEQ ID NO: 121 - protein, 184 aa, Nanoarcheum equitans
MKFILMVWLYKILTTLEKKLYNNINKLEYAGANDINNMVALQYQTSDMDLEVYLKKDNFYAVTKKGLDKSTILKKIEYTKLFPFFDNRTPLEREIELADWVKEMIVNRFLYNIRTDTMGIRNEDDLIIAYKAGKFVLPIYFQLYIRPTDEGYKEIRELLEKNGLKRGKYRVIPMPLLKFLKERE

SEQ ID NO: 122 - DNA, 867 bp, Nanoarcheum equitans
atgtggatatttattgtttatgcgatagccctttatgtattgttaaaaaagtgggttaactatagtatagaaaaaaatttgtatggaatagacaaacataaaaacataaaggttggggaaagcgctggtacagttattggcattctattttctttggttttggcatggttaggttattataaaatggcctttgcttctctattggcaacatttttagggtatttagatgatacattggttttttcgcaaaaaaccaaactagtattgcctgtcctaattttaatacctttccatttctttgattttaatattctctacattttatttatgatattttctttcaatatatttaacatattcgctggatataacggtttagagagtgggaccgcattattgtatgggctaacattaacattatatttttatggatctgatctgtttacaatagcactattgtttagtttatcctcccttattttgtatttatttaacagatatcccgctaagctatttgttggggatagctttacatatttcgcgggcacagttatagggctattaactataaatacgcacaattttgtaatgtatttaacttatttacctttagtaatacatttcttattgtatattaaatcctatatcgacaaaggaaagagcacaagcgcttttgcgaaagtgaaagataattgtttatattatgatgaaaaaccctatcatcttacccaattaataataaagcttttacaaaaaagaataaaatgcattagagaagattatgttgtggcggttgctttaactattatagcaatcaataatatagtttggttgttgttagcaaaatttttaaatataccattctag

SEQ ID NO: 123 - protein, 288 aa, Nanoarcheum equitans
MWIFIVYAIALYVLLKKWVNYSIEKNLYGIDKHKNIKVGESAGTVIGILFSLVLAWLGYYKMAFASLLATFLGYLDDTLVFSQKTKLVLPVLILIPFHFFDFNILYILFMIFSFNIFNIFAGYNGLESGTALLYGLTLTLYFYGSDLFTIALLFSLSSLILYLFNRYPAKLFVGDSFTYFAGTVIGLLTINTHNFVMYLTYLPLVIHFLLYIKSYIDKGKSTSAFAKVKDNCLYYDEKPYHLTQLIIKLLQKRIKCIREDYVVAVALTIIAINNIVWLLLAKFLNIPF

SEQ ID NO: 124 - DNA, 1614 bp, Nanoarcheum equitans
atgatttgtaatttcgatgtaaaagaaaaaacccttaatattacaataaaattagaaaaaaatgaatattttgattgcaataaacttaaaggccctgtaattggatgcgaatacaacaaaaaagataaaacctttaaagtaacattcaaaataccttatgattatttcgctttctatcaaaataaggatagtatatatttgttagtgccatacaatgggttaaaaccctcattagaaaatgcgtcatataaaattttattactagatgaatgcaattatgctaaactattgtatgctaagcatagctttgagaatactttatttaatttagctaacttggattgtaaaacatactattatataaaaagcggttatccttctatatataattattgtgaaaaagtcgaaaacggttattgttatcataaattatataaaataaaaacacccttagaacaagttatacaaactcctcctttttgtgtgttagataatgcattcaaaaccctttacggggatttttatataaaactagctccagtcccaatagtaaggtctatactatttgcattacttatgggctctttcatatattatgtagggaaaagaataggaaacgctattggttatttcatagggtttggtttgtttactatattgtttatactactaaatgctttgcatttacctttcccaataatacaagcattatccttatatttgttttttaccatatttttgctaggttttacaagagcttcttcaatattgttgccagcttttttgttggtagatactttattgcctattctaattagaatgggagatacaagctatacaataatagatagctcttctttatttatactatggatcgctaatgttattacatctataatcactatagcaaaatccaaacatgaaaattccttggttatttctgctttgttattagttctatccatagttttaggatttttcacaatgccaaaaatggacaattttaattataatgaaatagccaatatattgcaattgctttccccagtgtggtctcaaaaaaccgctttattatttatattttctataacaatgggccagctttttgaagaattatcaaaaagcaatgctgctttagtattctatttagttttaagtttggttctattatacttttctgccagctcttttattattttgatagcaaccgcatttttgatttcggttttgtttattctatattatgaatcatttggcgataaaaatagattttttgttagctctttattgttagttgggttagtttctttaactaatttagaattatctactcaatatttgtatgcaatagcggggcattatttgttaatggcgagccatttcatatatttaattccttatttagaggaaagctggtatatcccaataatattgctaaacattattccttatgttttaatgtttaagttaagtttattggtaggacaaggaggaggattagatttgttgttaataattattggcgcattgcttagtgtgggaatttatatcaacattaaaacttctgttctatttttagcgagcgttttatcttattttgtaaaatatagatag

SEQ ID NO: 125 - protein, 537 aa, Nanoarcheum equitans
MICNFDVKEKTLNITIKLEKNEYFDCNKLKGPVIGCEYNKKDKTFKVTFKIPYDYFAFYQNKDSIYLLVPYNGLKPSLENASYKILLLDECNYAKLLYAKHSFENTLFNLANLDCKTYYYIKSGYPSIYNYCEKVENGYCYHKLYKIKTPLEQVIQTPPFCVLDNAFKTLYGDFYIKLAPVPIVRSILFALLMGSFIYYVGKRIGNAIGYFIGFGLFTILFILLNALHLPFPIIQALSLYLFFTIFLLGFTRASSILLPAFLLVDTLLPILIRMGDTSYTIIDSSSLFILWIANVITSIITIAKSKHENSLVISALLLVLSIVLGFFTMPKMDNFNYNEIANILQLLSPVWSQKTALLFIFSITMGQLFEELSKSNAALVFYLVLSLVLLYFSASSFIILIATAFLISVLFILYYESFGDKNRFFVSSLLLVGLVSLTNLELSTQYLYAIAGHYLLMASHFIYLIPYLEESWYIPIILLNIIPYVLMFKLSLLVGQGGGLDLLLIIIGALLSVGIYINIKTSVLFLASVLSYFVKYR

SEQ ID NO: 126 - DNA, 603 bp, Nanoarcheum equitans
atgcgatatggaggagttgacgaagcagggaggggtccaattattgggccaatggttattgctttagttattggagattctggatacttaaaagaattgggagtaaaagattctaaactattaacaaaagaacaaagagaagaactatttaatgagatagtcaaaaatagcttagtaaaatacgaaatagttagcccttctttaatagatagatataacttaaatgaacttgaagcgaaggtaacagcgaacttaattaatagtattgaggacgaaatatcccatatagttattgattctccagaaagacctgaaaattataaactaaggattttgaaatatttgaaaaagagggtaaaaattattaccaaaaataaaggagaagaagacccattagttgcagcagcatctattgtagcaaaagttataagagatagagaaatagaaaaaataaaagaacaaactggtatagattttggttctggttatccttcagataaaagaactagaaaagctttggaacaatattatagaatattaaaaccttatataagaaagaaatggccctttgaaataaacaaaaaactaacagatttcatatga

SEQ ID NO: 127 - protein, 200 aa, Nanoarcheum equitans
MRYGGVDEAGRGPIIGPMVIALVIGDSGYLKELGVKDSKLLTKEQREELFNEIVKNSLVKYEIVSPSLIDRYNLNELEAKVTANLINSIEDEISHIVIDSPERPENYKLRILKYLKKRVKIITKNKGEEDPLVAAASIVAKVIRDREIEKIKEQTGIDFGSGYPSDKRTRKALEQYYRILKPYIRKKWPFEINKKLTDFI

SEQ ID NO: 128 - DNA, 951 bp, Nanoarcheum equitans
atgatttatatattgggaactggggggaacatgcctacaaaatatagacaaaccctttctatttttgttaactatatgggaaagggcattttatttgatgctggagaaaatacacaaaggcaaatgcgtttgttaaatttatctcctacccaaatagattatatatttctaacccatatacatggagaccacattttgggcttaccaggaattctattaagtttgtcaaaccaagattataatagagagttaacaatttttggacctaaaggcattaaagaagttatagaaaaaattatagatagcttcgctataaatataaatttcccgttaaaaataaaagagattggcgaaaccaaaatagattttgggcctttttatatagaatctatctatggcatacaccaagtaccagttttggcctattctttcaaagaaaaggacaaaataaaaataaataaagagaaattagctaaatacaatataagatctaaccctaaattggccaaactaaaagaaggcaaatccgtaacaataaatggtataacattagaccctaaagagtttacttatatacaaaaaggcttaaagtttactttaataacagataccctttttagagagcaattcatagattttgctagagatagcgatataatatttcacgaattggcttttttagataaagacaaagataaagctatcgagcattaccattccacaattagcgacgcttttagaataagggatgaaagcaactctaaattgttagtttttatacatgttagtccaaggtaccagggctctttgtttgaaatataccaatacttatataataagaaggattggataattgccgaggatttggattatattgaatacaaaaaaggcactataatatataaaaggaatgatatagttttatacgaatatgcgatatggaggagttga

SEQ ID NO: 129 - protein, 316 aa, Nanoarcheum equitans
MIYILGTGGNMPTKYRQTLSIFVNYMGKGILFDAGENTQRQMRLLNLSPTQIDYIFLTHIHGDHILGLPGILLSLSNQDYNRELTIFGPKGIKEVIEKIIDSFAININFPLKIKEIGETKIDFGPFYIESIYGIHQVPVLAYSFKEKDKIKINKEKLAKYNIRSNPKLAKLKEGKSVTINGITLDPKEFTYIQKGLKFTLITDTLFREQFIDFARDSDIIFHELAFLDKDKDKAIEHYHSTISDAFRIRDESNSKLLVFIHVSPRYQGSLFEIYQYLYNKKDWIIAEDLDYIEYKKGTIIYKRNDIVLYEYAIWRS

SEQ ID NO: 130 - DNA, 237 bp, Nanoarcheum equitans
atgatgctattacaaacagagaaggcccttagactattggaacaatataataccataactatcttagttcctagggaatacactaaatccaaaataaaagaattctttgagaaaaaaggctacaaagttaaaaaagttaacactttaataacaaagaaagggctaaaaaaggcatatgtcagatttaaagaggaaggtgtagctagaaaagtagccgaagagttgggaggtttataa

SEQ ID NO: 131 - protein, 78 aa, Nanoarcheum equitans
MMLLQTEKALRLLEQYNTITILVPREYTKSKIKEFFEKKGYKVKKVNTLITKKGLKKAYVRFKEEGVARKVAEELGGL

SEQ ID NO: 132 - DNA, 621 bp, Nanoarcheum equitans
atggtcgacctattagcttttcttctttatacaataacagatataaagaaaaaagtaacaattagcgagtcagtagatttatatatagtgacaatgctattatataatatagttactaacaattggtttagaatcggtttagcaatagttacagcaattttattttacatagcaacaaaggctaaactattcgccataggggattattatttagcaattgcctattcgttttattctccaataggaataaacaatatttacggtttgtatttgtatatgtggtatgtattagttaacataaataaaatatggttattcctaatactattttacaaaagcattttgtttcgaattttaattactatgttagcattattctattatttcaaaggcacactaaaaaacaaaataataatggtaaaacctgattatttggaagagggcgatatagtagaaggcacaatagtttgggataaagtatacaaaaaacctattttaaataaaaagctcttgaataaactaaaacaaacaaatattagtattccaataagagatggttatccttttgcgccttactttttgttctcaattatagctaaaatttttcctccaaatccttag

SEQ ID NO: 133 - protein, 206 aa, Nanoarcheum equitans
MVDLLAFLLYTITDIKKKVTISESVDLYIVTMLLYNIVTNNWFRIGLAIVTAILFYIATKAKLFAIGDYYLAIAYSFYSPIGINNIYGLYLYMWYVLVNINKIWLFLILFYKSILFRILITMLALFYYFKGTLKNKIIMVKPDYLEEGDIVEGTIVWDKVYKKPILNKKLLNKLKQTNISIPIRDGYPFAPYFLFSIIAKIFPPNP

SEQ ID NO: 134 - DNA, 756 bp, Nanoarcheum equitans
atgaaaataaaaataattaacgcagattctttttccacaagaagtatgagtactgttatagataatattatgatagatccatctattgcggttggtccaaagagatatggcttgcccccacacccaatagaattaaaagctatggaagagggcaaaaaaagaataatagaggaattaaaaaaagtagatacagtatttattacccattaccattatgaccatgttcctaggccaggagatccaataatagacatactaaaaactaaaacggtctatgctaagaatttcgttaatatgaattattctcaacaacaaaggggaaaacttttttacaaagaagtaaaacctatattaattgacgaatataaatttgatgaagatattgaaacctttactctatggcatggctataagaattcgaaattctccaaagttttggcaattaggattaaggattttatttttgcaagtgattcccaatgcttaaatatagaggatatgaaaaaaatattagattatgatcctaaaatagtttttatttctgggcctccaacttacattaaatatgacccaataatagaaaaaacattggatttgttatctaatataaaaactgtaataatagaccaccatttattaagggatataaactataggaaatattttagagacaattttataactgctgcagagtttatgggatatgaaataaagcaattagaggcaaataggaaaaaactatggtcgacctattag

SEQ ID NO: 135 - protein, 251 aa, Nanoarcheum equitans
MKIKIINADSFSTRSMSTVIDNIMIDPSIAVGPKRYGLPPHPIELKAMEEGKKRIIEELKKVDTVFITHYHYDHVPRPGDPIIDILKTKTVYAKNFVNMNYSQQQRGKLFYKEVKPILIDEYKFDEDIETFTLWHGYKNSKFSKVLAIRIKDFIFASDSQCLNIEDMKKILDYDPKIVFISGPPTYIKYDPIIEKTLDLLSNIKTVIIDHHLLRDINYRKYFRDNFITAAEFMGYEIKQLEANRKKLWSTY

SEQ ID NO: 136 - DNA, 2031 bp, Nanoarcheum equitans
atgttacaccaactccccacgatggttgtagaagaaaaggcggtaaaagaggaagaagggtatagcgtgctaaaatgttattggattaatatagagaacacccctttagacgaggtaattttaataggtaaagacgaaaataatagagcttgtgaagttataattccatacaaatggtatttctattttgaaggcgatataaaggatttagaagaattcgctaacaacaaaaaaataaaaatcgaatatacaaaggagcaaaagaaatatatagaaaaaccaaaagatgtttataaagtatatgttttgcataaacattatccaatactaaaagaattcattaaagaaaagggctataaaaaatacgaaaccgatataaatgtttataggaagtttttaatagataaagggatagagccttttgaatggtttgaggtagaaggcaaaattttattatctacctctaacaaagttagaataaaagcacaaagtataaaaagattgtatgaaaagactaagccatcggttttagcttttgatatagaagtttacagtgaggctttccctaatcctgaaaaagacaaaataatatctatagccctttatggagacaattacgaaggggttatctcttacaaaggagaaccaactataaaagttaataccgaatatgaattaattgagaaatttgtcgaaataatagaaagcttaaaaccagacataatagttacatacaatggggataatttcgatatagactttttagtgaaaagggcttctttatacaatataaggctaccaataaaattggttaacaaaaaagagcctacttataattttagggaaagcgcacatgtagatttgtataaaacaattactaccatatataaaacccaattgtctacccaaacatattcattaaatgaagtagctaaagaaattcttggagaggagaaaatttatgattatgaaaacatgttatatgattgggccataggcaattataacaaagtgttcgaatacaatttaaaagatgccgaattaacatataagctattcaaatactatgaaaatgatttattggaattagcaagattggttaaccaaccattatttgatgtatctaggtttagctatagtaatatagttgaatggtatctaatcaaaaaaagcagaaaatataatgaaattgtgcctaacaaaccaaaaatggaagaagtagagagaagaaaattaaatacctatgcaggagcattcgtttacgaaccaaaacccggtttgtatgagaatttagctgtactggatttcgcttctctgtatccttcaattatattagagcataatgtttctccaggcacaatatattgtgagcatgatgattgtaaacaaaatggggtagaagcgataataaataatgagaaaaaatatgtgtggttttgcaaaaaagtaaaagggtttattccaacggtattagagcatttgtatacaaaaaggctagaacttaagagaaaactgaaagaactagatagggatagtgaagaatataaaattataaatgctaagcaagcagtattgaaaataataattaatgcaacctatggctatatgggtttcccaaatgcgagatggtattgcatagactgtgctgcggcagtagcagcttggggcaggaaatacattaattatatattaaaaagggccgaagaagaaggattcaaagtaatttatggagattctataatggatactgaaatagaggttatagaaaatggtataaaaaagaaagaaaagctaagcgatttgtttaacaaatactatgccggttttcaaataggggagaaacattatgctttccctccagatttgtatgtatatgatggagaaagatgggttaaagtatattcaataataaaacatgaaaccgagaccgatttatatgaaataaatgggataacattaagtgcaaaccatttagttttaagcaaaggcaattgggttaaagccaaggaatatgaaaataaaaataattaa

SEQ ID NO: 137 - protein, 676 aa, Nanoarcheum equitans
MLHQLPTMVVEEKAVKEEEGYSVLKCYWINIENTPLDEVILIGKDENNRACEVIIPYKWYFYFEGDIKDLEEFANNKKIKIEYTKEQKKYIEKPKDVYKVYVLHKHYPILKEFIKEKGYKKYETDINVYRKFLIDKGIEPFEWFEVEGKILLSTSNKVRIKAQSIKRLYEKTKPSVLAFDIEVYSEAFPNPEKDKIISIALYGDNYEGVISYKGEPTIKVNTEYELIEKFVEIIESLKPDIIVTYNGDNFDIDFLVKRASLYNIRLPIKLVNKKEPTYNFRESAHVDLYKTITTIYKTQLSTQTYSLNEVAKEILGEEKIYDYENMLYDWAIGNYNKVFEYNLKDAELTYKLFKYYENDLLELARLVNQPLFDVSRFSYSNIVEWYLIKKSRKYNEIVPNKPKMEEVERRKLNTYAGAFVYEPKPGLYENLAVLDFASLYPSIILEHNVSPGTIYCEHDDCKQNGVEAIINNEKKYVWFCKKVKGFIPTVLEHLYTKRLELKRKLKELDRDSEEYKIINAKQAVLKIIINATYGYMGFPNARWYCIDCAAAVAAWGRKYINYILKRAEEEGFKVIYGDSIMDTEIEVIENGIKKKEKLSDLFNKYYAGFQIGEKHYAFPPDLYVYDGERWVKVYSIIKHETETDLYEINGITLSANHLVLSKGNWVKAKEYENKNN

SEQ ID NO: 138 - DNA, 393 bp, Nanoarcheum equitans
atggcaaaagagcgatggggagtagcacatatatattcctctgagaataacacaataattcatataaccgatataactggggcagagactattgctgttggctctggaggtatggttgtaaatgccgatagattagaaggttcccctactgcagctatactagcagcaaaaagagcagcagcattagcaaaagaaagaggtattaccggtttacatataaaggttagagccccaggtgggcataatggtccttggattcctggaccaggggcaagtgcagcaataaagacattagcaagagaaggattgaaaatagggattatagaggatgttacaccaactccccacgatggttgtagaagaaaaggcggtaaaagaggaagaagggtatag

SEQ ID NO: 139 - protein, 130 aa, Nanoarcheum equitans
MAKERWGVAHIYSSENNTIIHITDITGAETIAVGSGGMVVNADRLEGSPTAAILAAKRAAALAKERGITGLHIKVRAPGGHNGPWIPGPGASAAIKTLAREGLKIGIIEDVTPTPHDGCRRKGGKRGRRV

SEQ ID NO: 140 - DNA, 798 bp, Nanoarcheum equitans
atgggggaggatccctctttcctaggaaacaagaagttctctattaatgtatacaaattacctacaggggatttgctaataattccagattatatatcgaaggaagcacaggagaaattgcatcaatatttcgtcgagggcattaattcatataaagtaaggctagagaaactatttcccgaagttaaagtaaattcctgctatactgttgatgtgttgccttctaattgtccccatcctatagtgccaatgctttcggtatatctaaatatagatcacaaaccctttataatatatggtataggagaacataacgcagcaagacatattgaggctttccataaaaaagttaataataggtctttgcttaccggaataaaagatccaaaatatggtattccaattagcttatcttgggtatggggagaagttctaacatggtttttgtccgataaaccagaactaatggattatagagatcttgtatacgcagatcgcatatacaaaatggatgttagcattgggcaccatggagatattgaaagtattaaacaattagaaaaatctgtaaggggagaaggggagcatgtggataatatttttggagttgcattagccaaacaattagatagggaagggtatgatttagagtatgtagtaaaaagagtaaaagagaagcctttcttaactttagaagatatggataaaatagaaaaaagactatcaattgatgctccatcgatattgaacattataaaagcagtggtcaaagcaaaagaagatcgtaactacatatga

SEQ ID NO: 141 - protein, 265 aa, Nanoarcheum equitans
MGEDPSFLGNKKFSINVYKLPTGDLLIIPDYISKEAQEKLHQYFVEGINSYKVRLEKLFPEVKVNSCYTVDVLPSNCPHPIVPMLSVYLNIDHKPFIIYGIGEHNAARHIEAFHKKVNNRSLLTGIKDPKYGIPISLSWVWGEVLTWFLSDKPELMDYRDLVYADRIYKMDVSIGHHGDIESIKQLEKSVRGEGEHVDNIFGVALAKQLDREGYDLEYVVKRVKEKPFLTLEDMDKIEKRLSIDAPSILNIIKAVVKAKEDRNYI

SEQ ID NO: 142 - DNA, 681 bp, Nanoarcheum equitans
atgatcaggcctaaaataattaaattatcggacaaagacgaattaatagcatctaatcctaatatagataaagcaaccaaagcatacaaaatggctaaaccacatgtagatacaattagagattatttgcctgcagaaaggggattatgtattgctgaaccacagtatgttaaactatgttacggttatttagtgaaattaccaaaagagttttctattttaccatataaaatagttagagatgctgtatatacatctttattggataatggtattgttatagaagatagcgaagaacgaatagagggcaatactttatatagggataaatttaacgcatcggcattggcttggctattaaccaaacatggaaataataaaatgggcttttctagggaatatctaactcttcgcgaaatgctctatacaaacaaaactataaaaggtagagagaaaaccttttcttatgtgcttggatcattattaggaagtgctttagaaaggaaaaatgttgatttcagagatatactagattctttaccaattataatagaagatagcttagaaataattgaagaagaaagagctaaaaaatatccatactataggaatatattacctaacccaccagcaaatacattgaaagcttgggtcgctttctctaaaaagtatctaagataa

SEQ ID NO: 143 - protein, 226 aa, Nanoarcheum equitans
MIRPKIIKLSDKDELIASNPNIDKATKAYKMAKPHVDTIRDYLPAERGLCIAEPQYVKLCYGYLVKLPKEFSILPYKIVRDAVYTSLLDNGIVIEDSEERIEGNTLYRDKFNASALAWLLTKHGNNKMGFSREYLTLREMLYTNKTIKGREKTFSYVLGSLLGSALERKNVDFRDILDSLPIIIEDSLEIIEEERAKKYPYYRNILPNPPANTLKAWVAFSKKYLR

SEQ ID NO: 144 - DNA, 504 bp, Nanoarcheum equitans
atggtagttgttatttcggggaagcacagtaaagtaattttatacaaaaatatagccataaagcaacacaaatacaaatataattatttaaaagaaaaatttttcctatcaaaaaggttttggtttatgcccaagcttttgtatagcgatgataaaaagcttatactaattatggaaaatgcgggcaaaccttttttaaacctaaagccatgggaaaaactatatactttgatagtaaccttctttataatggtttttttggatttaattaaaataaaaaaggaagaaatgcataggcctataaaacatatattccttaaagggccaagggtcatactaatagactgggaaagatcccatataggaaaaggcaacctaactcaatatgttcaatttgtttgtagagataaatgcaaagatttggccaaaaaatacaagaaaaaccccatttatttattgccattatttataaggtttttggttttagccaaaaatttatcttag

SEQ ID NO: 145 - protein, 167 aa, Nanoarcheum equitans
MVVVISGKHSKVILYKNIAIKQHKYKYNYLKEKFFLSKRFWFMPKLLYSDDKKLILIMENAGKPFLNLKPWEKLYTLIVTFFIMVFLDLIKIKKEEMHRPIKHIFLKGPRVILIDWERSHIGKGNLTQYVQFVCRDKCKDLAKKYKKNPIYLLPLFIRFLVLAKNLS

SEQ ID NO: 146 - DNA, 570 bp, Nanoarcheum equitans
ttggatagatctatagaattatccctacatctaattgtttatgccatattatctttgctagttttatcgctagtatttatgtttttttctaaatcccaatcacagctttctaaaataaaagggtttagcattgatgatatagaaaaaataaaagtactatgccaaaacctatgtaaaactgctaaaagctttgatgattataaagagtttttagtttcggattattgtaaaaggtggttcaaaataaaatatatagacaaaaaagagtataacttattagtaaaatgctggtggtggcccataaatataaaatgcgagaaatattaccaactaattactaaagaaggggtaaagacttatagggttttccagattggccttaataaagatggtttaaaccaatatatacaattaattgatggcaaacctattagtgaaaccaaaaatattaatgcaataaagagatcttacaatggagaaatagaagatgttactaatccttatactattagtgatttgaaaacctttatggaatattatggtagttgttatttcggggaagcacagtaa

SEQ ID NO: 147 - protein, 189 aa, Nanoarcheum equitans
  signal (1)..(34)
MDRSIELSLHLIVYAILSLLVLSLVFMFFSKSQSQLSKIKGFSIDDIEKIKVLCQNLCKTAKSFDDYKEFLVSDYCKRWFKIKYIDKKEYNLLVKCWWWPINIKCEKYYQLITKEGVKTYRVFQIGLNKDGLNQYIQLIDGKPISETKNINAIKRSYNGEIEDVTNPYTISDLKTFMEYYGSCYFGEAQ

SEQ ID NO: 148 - DNA, 579 bp, Nanoarcheum equitans
atggatttatctataaagggtataatatatgtaaaaaataaaccattgctaaatgttgatttggaatttactaatggtttttacaaaatagttggtccaaacggctctgggaaaacaactctattaaaaactatcgccggttttcctgaatacaaaatagatggccatataatatttaatggagaaccaatacacggtttgcctttatatgaaagagctaaaaaaggcatattctatttatcccaagttttgcctaacgaagtaggttatttaaaagacattttgtatgcattaaatatcaaagatcctgaattagataggtttagagacaaatttctattcaaagaattatctgggggcgaatcaagaataattgactttctaataacaaaaaacttaaatcctaaagttttgctattggatgaagtggaaacacatttagataaaaataatctacaaaaaataattgattacctaaagaatttcaaagggatagcgattattgttacacatactaatgtgttcgatatactaaatccaatcactatagacataactaaatttaaatacaacccatag

SEQ ID NO: 149 - protein, 192 aa, Nanoarcheum equitans
MDLSIKGIIYVKNKPLLNVDLEFTNGFYKIVGPNGSGKTTLLKTIAGFPEYKIDGHIIFNGEPIHGLPLYERAKKGIFYLSQVLPNEVGYLKDILYALNIKDPELDRFRDKFLFKELSGGESRIIDFLITKNLNPKVLLLDEVETHLDKNNLQKIIDYLKNFKGIAIIVTHTNVFDILNPITIDITKFKYNP

SEQ ID NO: 150 - DNA, 1908 bp, Nanoarcheum equitans
gtgccattcaacgcttttcatcaaatatttataaagtataaatccattgcctcaacgtttatggagttacttgaggaaatattcaaatatatagataaaaacaaaataataggctatcgattcgaagggccaaaagtagtgctatttacaagagacaaagagcttttagtaaaagccccacagatattacaagagattgccaaaaaagtaaggagaagaatacatattagatatgatccaagacttctaaaggaggaaccagaaaaaatagaaaaactaataccaaaagaagcaggattgcaaagaatttatttcgaaaagggaaggggcatagtaaatatagaggttttattccctgaaaagatagatttgaatacaataaataaaataaaagaagaaacactttggttccctagaatatatagaagcccattgattagatcgaaaactatcgatatggttagagcttatatgttccaacattctaacgaaagaataaagcttttgcatgaaataggtaaaaatattagtgaaaagtggtctatacaaaaaggacaaacctgggttagagtaagctttttagggggagcatcccaagttgggaggtctgcattgttattacaaacgaaagagagcagaatactattagattttggggttgatttgtctttacctccaaacaacaaaaatgcttaccccattgtagaattgccagaatttgatgttaaagaattagacgctgtagtaattacccatgcacatttagaccatgtaggatttgtgccatttttatataaaatgggctacaagggcccggtatatttaacacccccaacattagatatcgctactcttagtttgttagattatttaagaatagccaatgaaaacaatgtcaaactatttagcggggacgatataagaaattttgtaaagcattctattactatagaatatggccaaactacagacatcgcttctgatgtaaaattaactttttacaatgcgggccatatactaggatcggcattggcccatctaaatatagccaatggttattctaatgtattatatactggggattataaggttaaaccaactttcctatttgatggtgctcaaatcccacaagcaaaagtcaatatcgctattactgaatcaacctatggagatacctatcataaacctagagaagaagtagaaaaagaatttttatcatttgtaaaagaggtaataaaaagaaaaggcaaactattaatacctgttttaggcgtaggaagagcccaagagatattgtatttattggttaaatcaataagggctaacaaattagatgaagtccctatatatttagatggtgtagtatgggaaattactgctatacacacagcttatcccgaatatctcaaagaggaaattagaaacaaaatattagctgggaaaaacccatttattgataaatttgttcatagggctccaagaaatagagaggaaatagtttattcaacagaaccatctataatattggctacttctggtatgctagttggaggcccatctgtgcaatacctaaagctaatggcagaagatcctaaaaacgccatagcttttgttagctatcaagggcctaacacattaggaagacaaatacaaagcggggtaagagaagtagaaatagatggccaattaataaaaataaacttagaagtaagatcttttgaaggtttttctggccatgccgataaaggggaaatagaatctttcttaagaagggttagaccaggcagagtagtaataaaccatggagagagaagcaaagtattgcatttggcttcttatttaagaaaaaagcttaatgtagaaaccaacgccccaaggaatatggatgcactagcattaaggatataa

SEQ ID NO: 151 - protein, 635 aa, Nanoarcheum equitans
MPFNAFHQIFIKYKSIASTFMELLEEIFKYIDKNKIIGYRFEGPKVVLFTRDKELLVKAPQILQEIAKKVRRRIHIRYDPRLLKEEPEKIEKLIPKEAGLQRIYFEKGRGIVNIEVLFPEKIDLNTINKIKEETLWFPRIYRSPLIRSKTIDMVRAYMFQHSNERIKLLHEIGKNISEKWSIQKGQTWVRVSFLGGASQVGRSALLLQTKESRILLDFGVDLSLPPNNKNAYPIVELPEFDVKELDAVVITHAHLDHVGFVPFLYKMGYKGPVYLTPPTLDIATLSLLDYLRIANENNVKLFSGDDIRNFVKHSITIEYGQTTDIASDVKLTFYNAGHILGSALAHLNIANGYSNVLYTGDYKVKPTFLFDGAQIPQAKVNIAITESTYGDTYHKPREEVEKEFLSFVKEVIKRKGKLLIPVLGVGRAQEILYLLVKSIRANKLDEVPIYLDGVVWEITAIHTAYPEYLKEEIRNKILAGKNPFIDKFVHRAPRNREEIVYSTEPSIILATSGMLVGGPSVQYLKLMAEDPKNAIAFVSYQGPNTLGRQIQSGVREVEIDGQLIKINLEVRSFEGFSGHADKGEIESFLRRVRPGRVVINHGERSKVLHLASYLRKKLNVETNAPRNMDALALRI

SEQ ID NO: 152 - DNA, 588 bp, Nanoarcheum equitans
atggcacatggccctagatatagagtaccctttagaagaaggcgagaaggcaaaaccgtctatagaaaaaggctaaagcttttactttcaggcaaacccaggttagtagtaagaaggtttaattcaaatatcttagctcaattagtagaatatgatcctaaaggagatagagttatatttactatccattctaatgtgttgaaaaaatatggatggaaaggacatagaggaaacctaccatcagcatatttggttggtttaattgctgggtatgaagcgttaaagagaggttacaaagaggctgtattagatataggtaggtacaaatccacaaaaggtaacgctttatatgcagtattgaaaggtgctttagacgctggtttaaatataccacatagcgaaactatattgccaagcgaagatagaattagaggggaacacatcgctaattacgcgaaaatgttaaaagagaacgaagagctatacaaaaagcaattctctcgctatttaaaagaaggcttagacccagagcaattgccaaaccatttcgaagaggtaaagcaaaaaattatatcgcaataccaataa

SEQ ID NO: 153 - protein, 195 aa, Nanoarcheum equitans
MAHGPRYRVPFRRRREGKTVYRKRLKLLLSGKPRLVVRRFNSNILAQLVEYDPKGDRVIFTIHSNVLKKYGWKGHRGNLPSAYLVGLIAGYEALKRGYKEAVLDIGRYKSTKGNALYAVLKGALDAGLNIPHSETILPSEDRIRGEHIANYAKMLKENEELYKKQFSRYLKEGLDPEQLPNHFEEVKQKIISQYQ

SEQ ID NO: 154 - DNA, 1215 bp, Nanoarcheum equitans
atgaaccccaaggaagaggcattaaaagtactaaaagaagcagacgaagtagccaatatagatgtgtacgaataccttaaagaaccagaaagggttgtagaaacttattttccagctagaacaaagaatggtatagaatatttcaaaggttatagagttcaatacaataccgctttaggccccgccaaagggggtattaggtttagccccacagtaacaaaagaggaagtagaagcattagcactatggatggtaattaagaacgctttattgggattgccctttggtggaggcaaaggaggagtagtagtaaaccccaaagaatatgaagaatgggaattagaaaacattgctagagggtttgttaggtctatagcagagtttattggagaagacaaagatattcctgccccagatgtgtatactaatgaaagaattatggcttatatgatggatgaatacgaaaaaatagtaagacataaggcatttggagttattacgggtaagcccataattttagggggtaaccccgtaagaaatattgccacatctttagggggatattatgtattaaatgaagcagtaaaattgaaaaaagttgaaaacactgtagcaatacaagggtttggaaatgctggacaaggtattgccaagctattagatggccaatataaaattgttgcagtaagcgattctaagggaggaatttattgtaaagatgggatagatatagaaaaactaattgaagtaaaaaagaaaaccggctctgttataaactatgaaggttgtgaaaaaattactaacgaacaattattagaattagatgttggcatattaattcccgctgcaatagagggagtaataacaaaacaaaatgctgacaaaataaaagctaaaataatattagaattggctaatggccctactacaagggaagcagataaaatattatacgaaaaaggagtattagtattacccgatgtattagccaatgctgggggtgtaacagtaagctatatagaatgggttggcaacaaaagagggatgccctttaatgaaaaagaaacaaaggaattattaaaggaaaagatggtacatgcatttctagatgttttagaagtatcgaacaaatacaatattgacatgcgtttagcatcctatattatagcattagaaagggtaaagcaagctatgcgctatagaggtttaatatag

SEQ ID NO: 155 - protein, 404 aa, Nanoarcheum equitans
MNPKEEALKVLKEADEVANIDVYEYLKEPERVVETYFPARTKNGIEYFKGYRVQYNTALGPAKGGIRFSPTVTKEEVEALALWMVIKNALLGLPFGGGKGGVVVNPKEYEEWELENIARGFVRSIAEFIGEDKDIPAPDVYTNERIMAYMMDEYEKIVRHKAFGVITGKPIILGGNPVRNIATSLGGYYVLNEAVKLKKVENTVAIQGFGNAGQGIAKLLDGQYKIVAVSDSKGGIYCKDGIDIEKLIEVKKKTGSVINYEGCEKITNEQLLELDVGILIPAAIEGVITKQNADKIKAKIILELANGPTTREADKILYEKGVLVLPDVLANAGGVTVSYIEWVGNKRGMPFNEKETKELLKEKMVHAFLDVLEVSNKYNIDMRLASYIIALERVKQAMRYRGLI

SEQ ID NO: 156 - DNA, 385 bp, Nanoarcheum equitans
atggacaaactatattttggccccgcaggtataccaaatagtgctgaaaaaagagacttattaaatggacttaaaacagttaaaaatttaggattagatgcgatggaattagaattcgtatatggtgtaagatacaacccaagggttttacctttagttaaagaattcgcccaaaaaaataatatagtacttacggcccatgctccatattatattaatttagctgcaaaagaaaaggaaaaaatagaaaaaagcattaagtatatcctagatactgccagagttttaaatgaactaaatggttatagcatagtatttcatcctggctattatatgaaaagagatcctaaagaggtttataagatagtgaaagaaaatttggcca

SEQ ID NO: 157 - protein, 128 aa, Nanoarcheum equitans
MDKLYFGPAGIPNSAEKRDLLNGLKTVKNLGLDAMELEFVYGVRYNPRVLPLVKEFAQKNNIVLTAHAPYYINLAAKEKEKIEKSIKYILDTARVLNELNGYSIVFHPGYYMKRDPKEVYKIVKENLA

SEQ ID NO: 158 - DNA, 1434 bp, Nanoarcheum equitans
atggatataaagcttagaaaaatagataagtatatttgggagataccaaaagaaggcaaaatgaatgttccagttagaatatacgctagcgataaacttatagaaaaaatgaaagaagatagaacattaatacaagcaagaaatgtatcgatgttgcctaaaatagttaaacacatggtagtaatgccggatggccatgaggggtatggcccaccaattgggggggtaggagcttttagcttggacaaccccccagtaatacctggcttcgttggttttgatataaattgtggggtaaggctattaagaacaaatctaactattgatgaaataaaggacaggttaaatttattggtaaatgaaatatttagaaatgttcctgctggtgtaggcgaaggggggaaactaaagctctctattgatgaactaaacaaagttttagactatggagtaaactgggcaatagataatggctttggttgggaagaagataggaatagaatcgaaagccatggttatttggattttgccgattctgatgcggtatctaatactgctaaacaaaggggtaaagaccaattaggcactataggttctggaaatcatttcctagaaatacaagtagtagaccaaatttacgatgaagagatagctaaagcttttggaatatatgaaaaaaatcaggttacagttttaatccataccggtagtagggggttaggccaccaagtggcatcggactatttaagattgttcgagaaaaaatacaaatatgatgtgccagatagagaattaatttatgcaccatatgatagtaaagatgcacaaaactatctaaaagcgatggccgctgcagctaattttgcttgggcaaatagacaattaattacctattgggtaaggaaaagctttgaaaaagtattaaggaaaaatatagaatcaataggtttagaaatagtttatgatttggcccataacatagcgaagttcgaagagcatacaatagatggcaaaaaacaaaaacttatagtttatagaaagggtgcaactagagcatttcccccagggcataaagaattgtggggcgaatacaaaaaatacggccaacctgtaataataccaggttcaatgggaacagcttcttatctattggtaggacaaccaaaagcgatggaactatcttttggttcttctgctcatggtgctgggagacaattatctagagtaaaggctaaaaagctatattcttattctgaagtaataagaaaactaagagaaatgggaataatagttaaatcaacaacaaaaactggagtattagaagaaatacctgaagcatacaaagatatagacgaagtagtaagggtaacccacgaattgggaataagcaaaattgttgcaaggtttagaccagtagcagtaattaaaggatga

SEQ ID NO: 159 - protein, 477 aa, Nanoarcheum equitans
MDIKLRKIDKYIWEIPKEGKMNVPVRIYASDKLIEKMKEDRTLIQARNVSMLPKIVKHMVVMPDGHEGYGPPIGGVGAFSLDNPPVIPGFVGFDINCGVRLLRTNLTIDEIKDRLNLLVNEIFRNVPAGVGEGGKLKLSIDELNKVLDYGVNWAIDNGFGWEEDRNRIESHGYLDFADSDAVSNTAKQRGKDQLGTIGSGNHFLEIQVVDQIYDEEIAKAFGIYEKNQVTVLIHTGSRGLGHQVASDYLRLFEKKYKYDVPDRELIYAPYDSKDAQNYLKAMAAAANFAWANRQLITYWVRKSFEKVLRKNIESIGLEIVYDLAHNIAKFEEHTIDGKKQKLIVYRKGATRAFPPGHKELWGEYKKYGQPVIIPGSMGTASYLLVGQPKAMELSFGSSAHGAGRQLSRVKAKKLYSYSEVIRKLREMGIIVKSTTKTGVLEEIPEAYKDIDEVVRVTHELGISKIVARFRPVAVIKG

SEQ ID NO: 160 - DNA, 948 bp, Nanoarcheum equitans
atgatgatgtcgtatactcgtatggcggaggagctaaaggttttccccaaggttttgaaattccttgtccttggtaaacctatccaatttaattttcatagtgtacagaaaggtgaggataaaactacactacagattgaagactgggagtacgggtacataaaatccgagtatgattctagaaataataaaataatattgaaatgggacaataataaatatgagaatggtttatcgtctccttttgaaataaaaaaggacaaggaaaaagatattgatataaaggcctatcgaaagatagttgataatggaccatggaaaacttttgaaaactgtccaataagggaagatgatataaacaaatacttgggtggtggtttttggcaagaaaatgagagcataattttggctgtagaaagaaaaggaaaattatactctctaaaattgaggggccccagtatagaggtaatgccagagcttgatggttcaaatgtttatgtaataagaactagtaagggagaccatgttgctgcaactttttatttttcttatccagatatgcctggaaagggagacatcttttttgataatttattaactcaattactctcttatgccccagcgcttcttcatttattattagaaaaagggtatatagatccaaataaagaatggtacctctattttgaagctaacgatgttaataataaaaggaagattcctagtagcttgttggacgcaatgtttcgtggttggtatgcttatgctagcaaaggcgaaaacaagctcgataaaacaataatatttacgccaagcccagtagacctttatcaaatgattcctaatttggcgttagcaaatactcttagggcaggtttgtattatactgcaaataaaattttagaagataataaagacaagcaatatggggacacaaaacaaggataa

SEQ ID NO: 161 - protein, 315 aa, Nanoarcheum equitans
MMMSYTRMAEELKVFPKVLKFLVLGKPIQFNFHSVQKGEDKTTLQIEDWEYGYIKSEYDSRNNKIILKWDNNKYENGLSSPFEIKKDKEKDIDIKAYRKIVDNGPWKTFENCPIREDDINKYLGGGFWQENESIILAVERKGKLYSLKLRGPSIEVMPELDGSNVYVIRTSKGDHVAATFYFSYPDMPGKGDIFFDNLLTQLLSYAPALLHLLLEKGYIDPNKEWYLYFEANDVNNKRKIPSSLLDAMFRGWYAYASKGENKLDKTIIFTPSPVDLYQMIPNLALANTLRAGLYYTANKILEDNKDKQYGDTKQG

SEQ ID NO: 162 - DNA, 1209 bp, Nanoarcheum equitans
atgagggtaaagcttccctcaaaagtaaaccttgaaaaagtgctccaaaaggttaaaaccccaaagctaaccccagagaaaaaattagagatagcacaaaagctttatgaacatagcaatgtattaaaacccctattattaagcataggtttaggatatgctttgcctgctttgggtgaagagataaaaatcgataaagtcaaagtaactggaatagacaaaataaatccatacaaagatgcccatagcgaagaaaaagtaacatttactagagttttaccgaatgaagaacaaaccattgaattagaaataggtacaccaactgttactaccataccagttaattacaatggaacagaagagctaactgttacattaagtaatgatgtagtaaccttgaagtatacaatggatataacaaaaaccctaactgtatgggcccagaaaatcaaagggaccgtcacagatatttctacttcgattcgaaaagaattgtttggtcaaagtacaaaaaccatcacagaaatatttaacttagagggtgttgcttatgtcataaaagacggcacagctaatatattattagtattaaaagatatgggagaaaaagcagaatctctaataccatatttggccaaagcttatggttctgctgttaattatttgttacagtttgtgccaactattgaaaaatggagtagttccattaatgaatttctcggaataaatcccgatagcacacctgtgaaagatagcattaaaataagtaaagcgtggaacgaattaataaacaataccaaagcttatgtagagagaataaaaggaataaacggaggaatagagatggataagatattaccaaaaatgtcttttgtaaaggcggacggtgggatcgctaaaagaaattatattccattagtattaacagaaaaaatattggaaggggagcataaactagatatcacgcaagggaatggaggagtgcctccatataaaaatttcacagggccatacggttttttctattatataaaggaatggttagagccttccaagtttaacagcttaaaagaatacatatgggaagttatgtatcgttcagtaaggaatgcattaaccaaaaccggtttatataatccaaagcacttatatgctgttcctaacccctatgaggatctaaatatagaggatttggcaaaattaaaataa

SEQ ID NO: 163 - protein, 402 aa, Nanoarcheum equitans
MRVKLPSKVNLEKVLQKVKTPKLTPEKKLEIAQKLYEHSNVLKPLLLSIGLGYALPALGEEIKIDKVKVTGIDKINPYKDAHSEEKVTFTRVLPNEEQTIELEIGTPTVTTIPVNYNGTEELTVTLSNDVVTLKYTMDITKTLTVWAQKIKGTVTDISTSIRKELFGQSTKTITEIFNLEGVAYVIKDGTANILLVLKDMGEKAESLIPYLAKAYGSAVNYLLQFVPTIEKWSSSINEFLGINPDSTPVKDSIKISKAWNELINNTKAYVERIKGINGGIEMDKILPKMSFVKADGGIAKRNYIPLVLTEKILEGEHKLDITQGNGGVPPYKNFTGPYGFFYYIKEWLEPSKFNSLKEYIWEVMYRSVRNALTKTGLYNPKHLYAVPNPYEDLNIEDLAKLK

SEQ ID NO: 164 - DNA, 603 bp, Nanoarcheum equitans
atgagtaatgaatatgttaaagtccccttatgtgctttaaaaaaggaatggttaaacaaatcccaaattatatatgagaaaaacaaaccttatgctttaattgataaaaacgatttggaaaaagctttgggttctccaataaaatgtatcgccccagggttaggagaatacataaaatctgtgggctcttatatagcggtaagccccatactaaataaattaacaaaattacaagacatatactctaatgaagccatgttcgtaagctgggtctatggggtatacccttctataaaagctttgtaccacacattaaaaaaagaatattctaaagctaaagaggatttagaagaaataaaattgttaccctatgttttacctgcatatttatcatgggttgctctaaaacagcatattaatcctaatatagatttagatgggccaaaccaatatttatttaatgtattaaacacatttgctaacctaatggctttaagcatttacataccaacagttgtaaaaatggaaatggccataaaagataaaataaaaaacatttccccattaaaagttataaaaaatatatatgccaaaccccagtaa

SEQ ID NO: 165 - protein, 200 aa, Nanoarcheum equitans
MSNEYVKVPLCALKKEWLNKSQIIYEKNKPYALIDKNDLEKALGSPIKCIAPGLGEYIKSVGSYIAVSPILNKLTKLQDIYSNEAMFVSWVYGVYPSIKALYHTLKKEYSKAKEDLEEIKLLPYVLPAYLSWVALKQHINPNIDLDGPNQYLFNVLNTFANLMALSIYIPTVVKMEMAIKDKIKNISPLKVIKNIYAKPQ

SEQ ID NO: 166 - DNA, 1302 bp, Nanoarcheum equitans
atgcctagagagaaaccccacatcaatgtagtattcataggacatgtagaccatggtaagtctaccacagtaggtaggctaaaatatgatttaggtttaataccagagtccgaattggagaaaattagagaagaagctaaaaagtatggtaaggaggaattcgtatttgcttatctaatggatagacaaaaagaagagagagccagaggtgttacaattgatatagctcatacagaattggaaaccccacacaattacattacaattgttgacgctcctggccacaaagacttcgtaaagaacatgattactggagcgtctcaagcagatgcggcagtattagtagtagcagcagacgacggtgtacaagaacaaacccaagaacacgcagtattagcaagaacattcggtataaaccaaataattgtatacataaacaaaatggataaggttaactacgaccaaaaaagattcgaagaggtgaaaaaccaagtattaaaactattgaaaatgattggatacaaagatgaaaacattattgctgtaattcctggggcgtctttccatggagacaatgtagtaaagaaatctgacaaaatgccttggtacaatggaccaacattgtatgaagctttagacatgttaaaacccccacaattaccagttgatttgccattaagaataccaatacaaagcgcattatccataaaaggtattggtacagtattaacaggaagagtagagactggtaaactaaaaccaggtgacaaaataattgttttaccatccaagaagccaaacggtgcgattggggaagttaaatctatagaaatgcatcacaaaccattagaagaagcattgcctggagacaacataggttttagcgtaagaggtatcgaaaagggtgatgtaatgagaggagatgttgcaggccatttggataacccaccaacagttgcagaggagatagtagcgttaatacatgttatataccatccatctgcaataaccgttggttatgccccagtattacatgtacacacagcacatgtcccagtaaggtttgaagagctaagaggtaaagtaaaccccgcaactggacaagtaattgaagaaaacccgcaagcattaaggccaggtgaagcagcagtagtaaaattaaaaccattgaaaccagtagtaatagaaccattcgataaaatcccacaattaggaagattcgctattagagatatgggtagaactgtagcaatagggatcgcaagacaggtaacgcccaaacaaattgaaatcaaaaaataa

SEQ ID NO: 167 - protein, 433 aa, Nanoarcheum equitans
MPREKPHINVVFIGHVDHGKSTTVGRLKYDLGLIPESELEKIREEAKKYGKEEFVFAYLMDRQKEERARGVTIDIAHTELETPHNYITIVDAPGHKDFVKNMITGASQADAAVLVVAADDGVQEQTQEHAVLARTFGINQIIVYINKMDKVNYDQKRFEEVKNQVLKLLKMIGYKDENIIAVIPGASFHGDNVVKKSDKMPWYNGPTLYEALDMLKPPQLPVDLPLRIPIQSALSIKGIGTVLTGRVETGKLKPGDKIIVLPSKKPNGAIGEVKSIEMHHKPLEEALPGDNIGFSVRGIEKGDVMRGDVAGHLDNPPTVAEEIVALIHVIYHPSAITVGYAPVLHVHTAHVPVRFEELRGKVNPATGQVIEENPQALRPGEAAVVKLKPLKPVVIEPFDKIPQLGRFAIRDMGRTVAIGIARQVTPKQIEIKK

SEQ ID NO: 168 - DNA, 330 bp, Nanoarcheum equitans
atgcctttcttaagaattaaaatttattctactgatttagaagaattaaatagggtagtagaaaaaataaaagagatagttaaacaaacaggtgtaaagatgagaggcccaatacctttaccaaccaaaatattaagagtcccagtattaagaattactgggcatagaggtacaaaaatatgggacacctaccaaatgagaatccatagaaggattatagatattgccacagatgatagaacaataaaattgttgatgagaactcctttaattactaaacccgaaaaaatacaaattcaactaaaatatattaaggataaaaacttataa

SEQ ID NO: 169 - protein, 109 aa, Nanoarcheum equitans
MPFLRIKIYSTDLEELNRVVEKIKEIVKQTGVKMRGPIPLPTKILRVPVLRITGHRGTKIWDTYQMRIHRRIIDIATDDRTIKLLMRTPLITKPEKIQIQLKYIKDKNL

SEQ ID NO: 170 - DNA, 1059 bp, Nanoarcheum equitans
atgaaagttgtaccattagattttccattgggggaagcagtaaagttattagaggaagaagatttgctagctagcaaaaaagaagatactgttttagggactaacgaatatgttttactaaaaaaatctgcatggaaaatgccagttaatacaaaatttgagagttattctgtaccaatcccaacaatagatgggaaaaacgattacgaaattgcaaaactaatgtttgaaacaaggtttttagaattgccaaatgaagaccttacaaaatctatacattatacagatttgctaaaaaaatacaaagataaaataattactaacccaaccaggtattttggagactatatagatgtgcaagctagtgaaacggtattagcagtattgtatgaaatgaaaagacaaaaagtagaatacgctacagttttagagggggaaaaaccaattggtgtaatttctttgaaagatatattctctaaaataatatttccaaagaaaaagccaagagaaggtgaattcgttgacgaatatgataggccattaaaattaccaataagagaattcgtaaacgatgtagtaatagagaccgacgatataaaagaagtaatagagctaatgttagataaaaacgttagatctgtgcctttgttagttaatggcagatatgttggaacaattactgtggatgaaatattaaaagaaataggttacatagaagaaaagggcaaatattttatacatgtgcattctaatgtagatttgtatgaggatgattacgattatatagaaaaggaatttgtaagaaaagtatggagaaaatataaagactatttggaaaccgctactttatatttagacataaaaagggaaaaaggtgttttgcccgacaatatagaatatttttggcatgtttctgctaggttaataacaccaaaaggcaaattcgttgctagagtagtgggaccttctttgtatagcgctatcaaaatgattatgagagaactagtttatgaaataaagaaaaagaaagaagaatcgatagaattcgatatagtatga

SEQ ID NO: 171 - protein, 352 aa, Nanoarcheum equitans
MKVVPLDFPLGEAVKLLEEEDLLASKKEDTVLGTNEYVLLKKSAWKMPVNTKFESYSVPIPTIDGKNDYEIAKLMFETRFLELPNEDLTKSIHYTDLLKKYKDKIITNPTRYFGDYIDVQASETVLAVLYEMKRQKVEYATVLEGEKPIGVISLKDIFSKIIFPKKKPREGEFVDEYDRPLKLPIREFVNDVVIETDDIKEVIELMLDKNVRSVPLLVNGRYVGTITVDEILKEIGYIEEKGKYFIHVHSNVDLYEDDYDYIEKEFVRKVWRKYKDYLETATLYLDIKREKGVLPDNIEYFWHVSARLITPKGKFVARVVGPSLYSAIKMIMRELVYEIKKKKEESIEFDIV

SEQ ID NO: 172 - DNA, 528 bp, Nanoarcheum equitans
atgaaaagaactataattttattgctatctgctttagcattaggagtagctttatcgcaaattgcttttcttttagaaataaaattagacataaagaaaaccacagattatataattagaccatataaaacatcaaaaatcgttaatgctataattttagatggaaaccaatttgaagggcaggacaatcaaacatatgttattccattatatataaaaggaaacggaaaatacaaattttctatagaactaaaaaattttgatggtagcgctttattagctattggtttgttcgattcagataataaagagtttggcgaacaatataatataaaagcttattataacagcacaaatccaaaatatttcaatccttataaatatatcgtttgcaacaaagattgttctttattgtataacacaacaatagaaagcgaaaagcgttttgtgatccttttacatatatacaatataaatgagaacaaaactataacattatcgattagggcaaatgaggttccaaattaa

SEQ ID NO: 173 - protein, 175 aa, Nanoarcheum equitans
  signal (1)..(24)
MKRTIILLLSALALGVALSQIAFLLEIKLDIKKTTDYIIRPYKTSKIVNAIILDGNQFEGQDNQTYVIPLYIKGNGKYKFSIELKNFDGSALLAIGLFDSDNKEFGEQYNIKAYYNSTNPKYFNPYKYIVCNKDCSLLYNTTIESEKRFVILLHIYNINENKTITLSIRANEVPN

SEQ ID NO: 174 - DNA, 1494 bp, Nanoarcheum equitans
atgaggttccaaattaatgatttcttagatatagagtatagcgagcaatatccccaaaagatatctgaaatagagtgggcattcccttcaaagaaaaaatatgacgagtttttgggggaattattatttaatatccaattaatggatttaaaattatcaaaaaaacttagagaggaatattttgccactccctatagtccaatatcgaaaatgtttggccaaactgtaagtgggttattccaaaatgtttccaatttgggtaaactaattaacgatctaactagggcaataataagtcatatacaagaattgtatggtattagagagaaattggacataataaaagatgcctgtgcggatgagaactgtgaaaaactaaaatttttcataacaaaagatatggaaaaagaattcaaaaaaattgaagaaaaatatggagaaatagtttcagaaagaatgattaatcctgcagtattgtatttgaaaagcctatggttaaacaattctgaatatgggcaaagaataaaagctttaactaatatagcgccgagcataatagattattttaacgctatagagaatgaagaggaggcttacaaattgccaactaatgaaagaataaaaagaatcgtagcgagtgcaataaagcattttagaaaatggcttatacaatataacaaactattgaaagctagataccaaatgcaaaaagcttatttgaaaatgcagttagcttatttatatacttatctaaggatacttcaaccatatctaagagctttgtatgcttttaaccaaaaatatgtttcccctacagaaccgttaattaattttacaaacaaaatggtttgggaattagaatttcttatagaaatagacaaaaaaggcaaatttatcgcttgtttatgggttaaggtaaagctatctggttcgggtaatgagttaaatttgttacaaaacccctctgtaaatatattagtccaaactttggttttgagtgaagatgattacaaagaattagacagaaaaataaaccaagatataataatggcatttcaacaattgttaaatatgtctttagatcaattcaaagagttaataatatatatattcgaagacgaaattgataataatactattccagggttagagtggttaataactaaagaagacatagaaaagtataaaaacaaaaacaaaaaagaggagaaaaaagaagaaaaaaaggaagagaagaaagaggaaaaagaagagaagaaaaagaaatggtgcaatttgccaatattggatgctttgtgtgggttatatttggctttcaaaccattgttttccctattgcctaaaaaaccagagaaaaaagaggaaaagaaagaagaagaaaaagatgataaaaaagactgggaagaagctaaaaataaagctatagaaaaaactaacgacttgttcaaaactatagccaaaatagcagaattgccattaaaagatgctttataa

SEQ ID NO: 175 - protein, 497 aa, Nanoarcheum equitans
MRFQINDFLDIEYSEQYPQKISEIEWAFPSKKKYDEFLGELLFNIQLMDLKLSKKLREEYFATPYSPISKMFGQTVSGLFQNVSNLGKLINDLTRAIISHIQELYGIREKLDIIKDACADENCEKLKFFITKDMEKEFKKIEEKYGEIVSERMINPAVLYLKSLWLNNSEYGQRIKALTNIAPSIIDYFNAIENEEEAYKLPTNERIKRIVASAIKHFRKWLIQYNKLLKARYQMQKAYLKMQLAYLYTYLRILQPYLRALYAFNQKYVSPTEPLINFTNKMVWELEFLIEIDKKGKFIACLWVKVKLSGSGNELNLLQNPSVNILVQTLVLSEDDYKELDRKINQDIIMAFQQLLNMSLDQFKELIIYIFEDEIDNNTIPGLEWLITKEDIEKYKNKNKKEEKKEEKKEEKKEEKEEKKKKWCNLPILDALCGLYLAFKPLFSLLPKKPEKKEEKKEEEKDDKKDWEEAKNKAIEKTNDLFKTIAKIAELPLKDAL

SEQ ID NO: 176 - DNA, 1020 bp, Nanoarcheum equitans
atgggtgtaaacttaaaagagatagtagatcctgtaaaaaaggaaatagagtttaagcaattgtttggaaaagttatagccattgatgctttcaatgctttataccaatttttattttctattagacaagatggagaacctttgagagatagcaaaggcaggataacctcccatctatctggtttgttctatagaactataaatttgttagaatatggtataaaaccaatctatgtttttgatggcacccccccaaaatttaaaattgttgcatgggaaaaaagaaaaaaacataaggaacaattagaaagcaaatacaaagaagcgttgaaaaaaggtaatatacaagaagcaataaaatatgcaaaaagcttgggcaaactagatagttatatggttgaagaagccaaaaaattgttggaagcgatgggtataccctatgtgcaagcccctagcgaaggggaagcagaagctgcttatttaactaaaaagggtgtttctgattattgtggtagccaagattatgactctctattgtttggttctccaagggttgttaggaatataactattagcgaaaaaagaaaattgccaggcaaaaatatttatgtggaagtaaaaccagaggtaatagagttagaagcagtattaaattattggaagataactagagaacaattaatagctattgccatgcttttaggaacagattataatgaaaaagtccctggcatagggccaaaaacagcaatagaaatagtaaaaaggttcggcgatccaataaaagttatagaatactataaaatacccaatggaaaggaaatattcgagtttttccttaaccccccggtcatagattttgaacctaaatggggaaaaccaaacaaagagctaatatttaaaattttggtagaagagcatgactttaacccagaaagagtagagagagcaatcgaaagattagaaaaagctcttaataagataaatcaaaaaactttatttagcttttttggtagttag

SEQ ID NO: 177 - protein, 339 aa, Nanoarcheum equitans
MGVNLKEIVDPVKKEIEFKQLFGKVIAIDAFNALYQFLFSIRQDGEPLRDSKGRITSHLSGLFYRTINLLEYGIKPIYVFDGTPPKFKIVAWEKRKKHKEQLESKYKEALKKGNIQEAIKYAKSLGKLDSYMVEEAKKLLEAMGIPYVQAPSEGEAEAAYLTKKGVSDYCGSQDYDSLLFGSPRVVRNITISEKRKLPGKNIYVEVKPEVIELEAVLNYWKITREQLIAIAMLLGTDYNEKVPGIGPKTAIEIVKRFGDPIKVIEYYKIPNGKEIFEFFLNPPVIDFEPKWGKPNKELIFKILVEEHDFNPERVERAIERLEKALNKINQKTLFSFFGS

SEQ ID NO: 178 - DNA, 1788 bp, Nanoarcheum equitans
gtggagctgtacttgccattagcaaaagatgaaaaattgaaagaactggggttagaaagacaaaacaaagtgtattataatgggaagttattaactatagaagagtatataagggaaaaactaaaagatagcgatttctgggcagtaaaaattgctttagaagcaatagaaagagcaaagaagaagaataaagatttgattactgttagatgtgctaataccccaacaggggttttacatataggtaatgctaacgatgtcattagagcatattttatagctaaagtaatagacattttaggatataatgttaggttagtatttacttctgacgatagagatccaatgagaggatttccatcgaaaatagcggacaaatatggaaatatcgttgattttaaagaaaaacatgaatacgaacaaaaatatgatggttttcctgtggcaagaataccagacccattcaaatgccattcctcttggagcgagcattttatttctatttactttaaagagttcgaattgctaggaataatagataatataagattcgaatattactcgccttccatattatataatacgggtttatgggagaatttagtaaaaaaagctttagaaaataaagataaaataaatgaaattcttagagagcataaagagcatgtaagagaatatccattctctgtaatatgtgagaactgcaatagaatcggtagcacacatgttataaactataatcctaaaacgaaagaagtagaatatatatgtgaatcaaggcatctaaagaaaaaaacaatacaaggctgtgggtataaaggaaaaaccactattagaaatggtaaactagattggtatgtggaatgggcaatggattgggcttattttgatacagatgtagaaccaatgggaaaagaccattatgtgtcttcttggaaaattagtcctaaaatagcaaaagaagtattcaatatagagccaccaataccggtagtatacgaattttttactgttgatggtaaaaaaatgtccggttccaaaggtaatatatacaatttaacagagttcttgaaaattatggaaaaagaggtagttttgtatttatatactaaaagacccacaacacatagagatataaagatggagaatattccttctttagttaaagaatatgatgaattggaaaagaaagttttattacatttgtctggtgaaaacaaaattgaaaatgaagaaattattgtttattatttaactaaaggatctattccaaaagagattcctaagaaaatagaatatagcactgcagcaatcataggacaaatagttttgcctaaggaatatctaattaatacccatttaccaataaaatttgaagaagaagtactagaaaggataaaaagagcttttgataggattaatattccattaaaggattataatttggaaaggctaaggaaagcaacatattgggctataacctatggcccagaaagagtaaaaattaaaccaaattatgagagaattactatacctttagacaaaaacgaattgcaagcattggaaaaaattattgaatatttggaaaaaatgaagcattatgatatggaagagatacaaacatcaatccacaatataataaaagagcacacagatccgaaaaagttttaccccaagctatataaaatgttaataaacaaagaacaagggccaaaaattgctagcctaataatcgctttaggaaaagaagaaataataaaaattttgtctaactaccaaaaaagctaa

SEQ ID NO: 179 - protein, 595 aa, Nanoarcheum equitans
MELYLPLAKDEKLKELGLERQNKVYYNGKLLTIEEYIREKLKDSDFWAVKIALEAIERAKKKNKDLITVRCANTPTGVLHIGNANDVIRAYFIAKVIDILGYNVRLVFTSDDRDPMRGFPSKIADKYGNIVDFKEKHEYEQKYDGFPVARIPDPFKCHSSWSEHFISIYFKEFELLGIIDNIRFEYYSPSILYNTGLWENLVKKALENKDKINEILREHKEHVREYPFSVICENCNRIGSTHVINYNPKTKEVEYICESRHLKKKTIQGCGYKGKTTIRNGKLDWYVEWAMDWAYFDTDVEPMGKDHYVSSWKISPKIAKEVFNIEPPIPVVYEFFTVDGKKMSGSKGNIYNLTEFLKIMEKEVVLYLYTKRPTTHRDIKMENIPSLVKEYDELEKKVLLHLSGENKIENEEIIVYYLTKGSIPKEIPKKIEYSTAAIIGQIVLPKEYLINTHLPIKFEEEVLERIKRAFDRINIPLKDYNLERLRKATYWAITYGPERVKIKPNYERITIPLDKNELQALEKIIEYLEKMKHYDMEEIQTSIHNIIKEHTDPKKFYPKLYKMLINKEQGPKIASLIIALGKEEIIKILSNYQKS

SEQ ID NO: 180 - DNA, 696 bp, Nanoarcheum equitans
gtgatgggatattttttacaattctataggaagcacaaacaaaaattcgtagatatggctaaagagttgttcggcgataaagatattttgtattatttggttgtttccaatgatttctatattgccacactaatatatgcgatagccaaaatgttcgatgttgacgatgacgaagctctaatatactcttttgttggagaactattagatgtgtccttaaaattaaaaaacgatgctttggaggatttagctagtaaatatattttattaaaaactattaatttagcaaggattccagatagaataatagatgctttaaaatattatttggaaggcgaagaactattaattaaaggcaaacctttagaatcgatagataaaaagagcgagttctattcctatatagtattgttaggccaaatacctgcaaacaacagcctaaacgaagacatactaatgaatttgggaaaagaattcggttatatttatataactatccaatatttgcgtgataataaaatagatgaacaaacagcgattgctttattgaaggatcatattaataaatatgaacagaccataaaaaagctaggtctaagcagttataggaatactttatcggatttacccaaagattttataaaagcttttgtttcaaaatataaaaaatttaaaaatttggaattgctcatatag

SEQ ID NO: 181 - protein, 231 aa, Nanoarcheum equitans
MMGYFLQFYRKHKQKFVDMAKELFGDKDILYYLVVSNDFYIATLIYAIAKMFDVDDDEALIYSFVGELLDVSLKLKNDALEDLASKYILLKTINLARIPDRIIDALKYYLEGEELLIKGKPLESIDKKSEFYSYIVLLGQIPANNSLNEDILMNLGKEFGYIYITIQYLRDNKIDEQTAIALLKDHINKYEQTIKKLGLSSYRNTLSDLPKDFIKAFVSKYKKFKNLELLI

SEQ ID NO: 182 - DNA, 1182 bp, Nanoarcheum equitans
ttgaaaattctcaataatcttattaacgaaaagctcggcactttaattagcactttaatttattccgcaataacaataatattagcgagaaggctagattcaaatagttttggtttgttcgtaatatttacaagccttactatgacttatgctttattaataaaccttgggacagcccaacaaataatcaaatacaaagatactaaatactatggtataattttagcaggaataataatttttttgcctattttcttaggtttgtactattttttacaatctttaatttcggatccaataatatatttattgctagtattggatagtatattcctagcttttattatgactttgagagctaatcttatagccaactaccaatatgatttatattctatatctatgctattggatgctattttaaagttaattatctctcttttttctcgaaacatatttttagactgggtaataacagattttctaatagcatcggcattgtttatctatattaaaccgaaaattactgtgaaaaatctaacaaaaagtgagctataccatttaattagttataatttaataaatttggccaaaaacacctattatataacagatacgatgattgtgggttttttgctttctcttaaagatgctggtatatacaaattggtctcacaaacaatagaggctttattaaatatattcaatgctagaaacgttttagctccagctattagggatttaaactggaaagattctctaaagctattgggaaaaacaatattttaccattctttaatagccattatttttgctatagcttttattttgctgggcaaaaaagttatagttttattgttgggaaaacaatacgaaatagtttatgatttaactttaatagctttgccaattgtgtttttggatagcctatcctatataaatgttttgttcgaatataaaggattcccccatttaagcgctatagctttatggatttcactaatagttaatatattcttcgatttgattttgataccaaaatattcaatcaaaggtgctataattgccactatattatcttatgcttcagcaatattgtttgggcttttctcttatttattctatgtgttcccacaaattaaagcaaagctaaagaaaatttataaagaaaaactaaaatag

SEQ ID NO: 183 - protein, 393 aa, Nanoarcheum equitans
MKILNNLINEKLGTLISTLIYSAITIILARRLDSNSFGLFVIFTSLTMTYALLINLGTAQQIIKYKDTKYYGIILAGIIIFLPIFLGLYYFLQSLISDPIIYLLLVLDSIFLAFIMTLRANLIANYQYDLYSISMLLDAILKLIISLFSRNIFLDWVITDFLIASALFIYIKPKITVKNLTKSELYHLISYNLINLAKNTYYITDTMIVGFLLSLKDAGIYKLVSQTIEALLNIFNARNVLAPAIRDLNWKDSLKLLGKTIFYHSLIAIIFAIAFILLGKKVIVLLLGKQYEIVYDLTLIALPIVFLDSLSYINVLFEYKGFPHLSAIALWISLIVNIFFDLILIPKYSIKGAIIATILSYASAILFGLFSYLFYVFPQIKAKLKKIYKEKLK

SEQ ID NO: 184 - DNA, 855 bp, Nanoarcheum equitans
atggtaaatccttctaaggttgaagaggttaataggttaaaagatattataaaaaaaggtaaaactgtagcaattgctaatattagggggatccctacgagagatttacaaagaattagaaaagaagttagaaacctagctaatatgagagtttctaaaaaaaggttaataattagagcattgaaagagactggttacgaagatttggctaacgaattggaaaaagaaaaagaggtaacagctttattattaagcacaaacgagaacatattcaaaatagcaaaaatattcatggaacataaagttaatgtcccgataaaagcaggggaaattgctccaaaagatatagttattccaaagggtataaccaatatacctgtgggtccaatacaaacagagcttagggcattgggagttaaaaccaaagtcactagtggtaaaatagagattgtagaagacgctgtagttgtaaaagaaggggaaatagtaagtccaaaagttgccaatgttttacaaactttgggtataaaaccaatagaaaggcaagtaactcttatagccgctaaagatgaagtattctatgacaaacaaatattgaatactccattagatctatatatagagcaattgaaagacgcttatataaaagctagaggtttagctatagaattagctatacctactaaagaaataattgacgaactattaattaaagcccatagaagttctattggtttagccatagaattgggcataccttctaaagaagttatagaccaaattttaattagagcagaaaatgctgctaaactattatatgacgaaataaaagataaaattgaaaattctcaataa

SEQ ID NO: 185 - protein, 284 aa, Nanoarcheum equitans
MVNPSKVEEVNRLKDIIKKGKTVAIANIRGIPTRDLQRIRKEVRNLANMRVSKKRLIIRALKETGYEDLANELEKEKEVTALLLSTNENIFKIAKIFMEHKVNVPIKAGEIAPKDIVIPKGITNIPVGPIQTELRALGVKTKVTSGKIEIVEDAVVVKEGEIVSPKVANVLQTLGIKPIERQVTLIAAKDEVFYDKQILNTPLDLYIEQLKDAYIKARGLAIELAIPTKEIIDELLIKAHRSSIGLAIELGIPSKEVIDQILIRAENAAKLLYDEIKDKIENSQ

SEQ ID NO: 186 - DNA, 402 bp, Nanoarcheum equitans
atgaaaccaataagtgcttcaatagtaagagctttacctgttggtgcttatttaaatgtggcagataactctggagcaaaagttgtaaagcttattgcagtaaaaggttacaaaggcagaaaaagaagactcgctaaagcaggtattgctgatttagttattgtatctgtaagagatggaaaaccagatatgatagggcaaatattcaaagcagtagtagttagaatgaaaaaagagtggcgtagaagagatggaacaagaattaagtttgaggataacgctgtagcgttattaaaagacgactatggaactccaaaaggaacaataataaaaactccaatagctaaagaagttgcagagaggtggccagatctcgcaaaaattgctagaattatagtctaa

SEQ ID NO: 187 - protein, 133 aa, Nanoarcheum equitans
MKPISASIVRALPVGAYLNVADNSGAKVVKLIAVKGYKGRKRRLAKAGIADLVIVSVRDGKPDMIGQIFKAVVVRMKKEWRRRDGTRIKFEDNAVALLKDDYGTPKGTIIKTPIAKEVAERWPDLAKIARIIV

SEQ ID NO: 188 - DNA, 621 bp, Nanoarcheum equitans
atgctagcaataataaaggaaacaatagctagctctttagctgtaattgataaattggttttaccctttcctttaattttatggtatctgtctgtatttttgtttattaatttgttcttttatggtttattgatttttctttcaaagaaaaaatccatagatatagaaattaaagaatgcaattggtttttctatagtgtattctttgctattatgtctaagttgcatttgccgttatattgtataaaagttccaaaaactaaagaaatagcaagaatatatttgtttgttatatctattattggtttgttcgctgtcaacgatattctaaaagagtatataatatttttcattgttagtaggttaattccttggcaaatattacatttttacttttattctataatagagaaagatcctgaaaaaatattaaagaaaaagtttgaacctttaacggatggcgattatataatacaatatttatttgaaaaagacatctatctccctattggtttgataataatagaatttttcttagacttgccatataaaattgctatcccttccctaatactaatattttggtctctctatgataaaatccttaaattttttatataa

SEQ ID NO: 189 - protein, 206 aa, Nanoarcheum equitans
MLAIIKETIASSLAVIDKLVLPFPLILWYLSVFLFINLFFYGLLIFLSKKKSIDIEIKECNWFFYSVFFAIMSKLHLPLYCIKVPKTKEIARIYLFVISIIGLFAVNDILKEYIIFFIVSRLIPWQILHFYFYSIIEKDPEKILKKKFEPLTDGDYIIQYLFEKDIYLPIGLIIIEFFLDLPYKIAIPSLILIFWSLYDKILKFFI

SEQ ID NO: 190 - DNA, 510 bp, Nanoarcheum equitans
atggaacaccctatgagaaaaattaggattgaaaaagttactcttaacattggggttggagaaagtggggaaaaattagataaagcttatgaattgttaaaaagacttacaggccaaaaaccagtaaaaacaaaagcaaaagttagggtagaacaatggcatattagacctggtttgcccataggtgtaaaagtaacattaagaggggaaaaagcttacaaaatattaaaagaaaaactattacccgcagtagatttcaaaataaaagcttcttcttttacagatagggggtttggttttggtatccccgaatatataatgattccaggaatgaaatatgatccagagttaggtttaataggattagaagcatatgtaacattagaaaggcctggctatagagttgaaaggagaagaataaaaagaagcaaagttggtagtaggcataggttaaataaagaagaaattattaaatgggcacaagaagagttgggagtacaaattatataa

SEQ ID NO: 191 - protein, 169 aa, Nanoarcheum equitans
MEHPMRKIRIEKVTLNIGVGESGEKLDKAYELLKRLTGQKPVKTKAKVRVEQWHIRPGLPIGVKVTLRGEKAYKILKEKLLPAVDFKIKASSFTDRGFGFGIPEYIMIPGMKYDPELGLIGLEAYVTLERPGYRVERRRIKRSKVGSRHRLNKEEIIKWAQEELGVQII

SEQ ID NO: 192 - DNA, 558 bp, Nanoarcheum equitans
atggtttctctaaaaatggagatttataactatggaactcaagataacgctttagttatagaaatgaaaagaggagaatcgattaatctaaaaaaggggtcacttatttttattaaaggtaaacatgcaataaaaccatcaaaagagaatagtttctttttattagaatgcctcgggcattgttctgtaggtgtttcgatgggtattggtaaaaaagaaataataaatgttattgagcctttatatataaatatgaataatgtaattggcttttacaatgctaaatatgtaaaactgggcaaaaaaataatagattataatacttctatggatctaatttatacaagggaaggtaattacattttgtcttacaaaggggataaactagaacttagaataggaaatgaaaaagttttagtagatttggacaatttggttctaactaatggcaaaataaaatttatccctcataaaaatgctgtaataacaggggaagaaccattgttagcagaaatcgaaggcccagcaataatatatttgcaaaccatcactttataa

SEQ ID NO: 193 - protein, 185 aa, Nanoarcheum equitans
MVSLKMEIYNYGTQDNALVIEMKRGESINLKKGSLIFIKGKHAIKPSKENSFFLLECLGHCSVGVSMGIGKKEIINVIEPLYINMNNVIGFYNAKYVKLGKKIIDYNTSMDLIYTREGNYILSYKGDKLELRIGNEKVLVDLDNLVLTNGKIKFIPHKNAVITGEEPLLAEIEGPAIIYLQTITL

SEQ ID NO: 194 - DNA, 831 bp, Nanoarcheum equitans
atgggtaaaataataagcgctatacaaattgcttacgaaggaggaatagatttagatactttgaaaagaatgcttaaatcatataaacccaaaggaaatgttattcccgatgttgttactaagcattatagagatttggaatttggccaactaaaaggggttagaatagtaagaatcgcaacccatccagattttcaaggaaaaggatttggttcaatagcattaaaagaaatgtctcaagatctaaaaaataaaggatttcattggattggtactggttttggagcaacagttaaactattaaatttttggctaaaaaatggttttattccagtccatataagtccggaaaaaaaccccgctactggagaatactcggttgtagttataaaaccattgtctaaaaaaacagaagaaataataaaaagggttaattttgaatttaaatggaaatttttaaattctgttacagatgtttttttcgatatagagcccaaattgggagtaatgttaacttatagcccatataagcatagcttagagaagcatggcattaaaatatttacagatgttcaattggatagaataaagctttatattaatggacctatgacatatgaagctgcggcagatctagttaggcttttagctattaaacattttgttgagagaaaaatcgaactaccaatagaaaaagaagaaaagttgtttgccaaatctttattggcatggagctggaaaaagatgtcggaatattatgacaaaaagccttcaaagcttagagacgaaataagaaagatatgcaaagaattataccgttcctatttctaa

SEQ ID NO: 195 - protein, 276 aa, Nanoarcheum equitans
MGKIISAIQIAYEGGIDLDTLKRMLKSYKPKGNVIPDVVTKHYRDLEFGQLKGVRIVRIATHPDFQGKGFGSIALKEMSQDLKNKGFHWIGTGFGATVKLLNFWLKNGFIPVHISPEKNPATGEYSVVVIKPLSKKTEEIIKRVNFEFKWKFLNSVTDVFFDIEPKLGVMLTYSPYKHSLEKHGIKIFTDVQLDRIKLYINGPMTYEAAADLVRLLAIKHFVERKIELPIEKEEKLFAKSLLAWSWKKMSEYYDKKPSKLRDEIRKICKELYRSYF

SEQ ID NO: 196 - DNA, 654 bp, Nanoarcheum equitans
atgcaaagaattataccgttcctatttctaatattagtattagtatttctatctctaataccaaagagttgtaaagtagaatatgttattgatggagatacaataaaaacgagttgtggtaaagtaaggctttctttaattgatgcccacgaaagaggagaaccgctatatgaaaaagcgaaagagtttgttcaacaatttcttagaaattgtgaccccgttataataaaagaaggctatgataaatataatagaattttagcgttagttaaatgtaacaacaaaacattgaatgttgagttagtaaaaaacaaactggctattgtttatttaaggtattgtccttattccaaatttagagattatgatatattttataatttttgccattatattaaatcaaacaaatatggttgtttagaactaaaaaggaaagggcaaaaagttattatttttaacaaatgcgataaaatccatatcgatgggtttgttactacatataatggagagtttattcctattaatgttactattgaaaaacaatatactatcgatttttatgcctattttcacaaaaatgttttagacccgaaagagaaaatttttgtattcgataggaatggctttttgttagctcagcttggctcttcttaa

SEQ ID NO: 197 - protein, 217 aa, Nanoarcheum equitans
  signal (1)..(25)
MQRIIPFLFLILVLVFLSLIPKSCKVEYVIDGDTIKTSCGKVRLSLIDAHERGEPLYEKAKEFVQQFLRNCDPVIIKEGYDKYNRILALVKCNNKTLNVELVKNKLAIVYLRYCPYSKFRDYDIFYNFCHYIKSNKYGCLELKRKGQKVIIFNKCDKIHIDGFVTTYNGEFIPINVTIEKQYTIDFYAYFHKNVLDPKEKIFVFDRNGFLLAQLGSS

SEQ ID NO: 198 - DNA, 831 bp, Nanoarcheum equitans
atgataaatgaggatttagtaaatacagtaagacaaatatttggtctaaatctatatgaagcaagaatttggttggctctattggctaaaggggaagctaccgctggagaactatcagatatggctaatgtcccaagaagtagggcttatgatattttagaaagcttagagaaaaaaggttttgtcgttatgagattaggaaaacctattaaatatgctgctatcccccctagagaagtatttaatagggtaaaacaaaggctattacaggaagcacaagaaaaagctaaaaaattagatttgatagcacaaagcgatttagctgcacaactagaattattatataaacaagggctaaagaatttagatataactgacaatgctgcttccattagggggagatatagtgtatattcccaaatggaggctatgctgaggggagcagaggaaaaagttataatattcactaccgaaactggagctattaggaaagtaagagcatttgaagagctatttaaacaattatacaataggggagtaaacataaaaatggcaacaaaaataacagagagaaatgtagaatatttgaaaaaaattgctccttatgtagaaattagggatagcgataaaataaatagtagaatgataatagttgatggaaaagaagtattatttatgctaaacgatgaccaaaatgcttatgaccaaaacgatgtcggtatatggattaattctgaatttttagctaaagctttagatagcttagttgaatatgcctttgataagctcccacatttcgaaaaagttttagaaaaactaaagcaaaaatga

SEQ ID NO: 199 - protein, 276 aa, Nanoarcheum equitans
MINEDLVNTVRQIFGLNLYEARIWLALLAKGEATAGELSDMANVPRSRAYDILESLEKKGFVVMRLGKPIKYAAIPPREVFNRVKQRLLQEAQEKAKKLDLIAQSDLAAQLELLYKQGLKNLDITDNAASIRGRYSVYSQMEAMLRGAEEKVIIFTTETGAIRKVRAFEELFKQLYNRGVNIKMATKITERNVEYLKKIAPYVEIRDSDKINSRMIIVDGKEVLFMLNDDQNAYDQNDVGIWINSEFLAKALDSLVEYAFDKLPHFEKVLEKLKQK

SEQ ID NO: 200 - DNA, 777 bp, Nanoarcheum equitans
gtgcgcagggcactagagttgccaataaacattataataatattagtaatagtgtttttcgtatttactattgttgtagggtttgtacctaagctattagggggaaccctaggcaaattaggaagaattagcgcttatacccaagctaatagtgttaccgctgcccaatccacatgccaaacatggtgtgaaactgcaaaacaagcgagttctccccaacaatttttaacttctacttattgtactaaaaaaatcgctatccctgcgtcgaatggttgttggccctccccagttaatgctgggggtagaggggaatggttacacccctgtgggggctctactgttagcgaaacccaatgtggagcaagaataacaaattttgatgaaaactataaaggaaataataatatgaaatcttacgaccctggctgtgtttctgctgacgatttgtataaggaatgtacaacagataatgatttatgtgtttttgtaccagcagggttaaaagttaatattccaaccaattgttggggaacccccatagaaacaccttgcgataccgttatatttgttggagataaaacctacgattgtggggtaagaaggttttatgttaaagtagataaaggaaaagttacattattccatagtaataatggtggaacagaagtagaaatgtgtgcttgtagggatatgtccagaacagataaggaagtttatttgatatattttgatggcaaagtattaacatgcactataggagagcaatgtcaataa

SEQ ID NO: 201 - protein, 258 aa, Nanoarcheum equitans
MRRALELPINIIIILVIVFFVFTIVVGFVPKLLGGTLGKLGRISAYTQANSVTAAQSTCQTWCETAKQASSPQQFLTSTYCTKKIAIPASNGCWPSPVNAGGRGEWLHPCGGSTVSETQCGARITNFDENYKGNNNMKSYDPGCVSADDLYKECTTDNDLCVFVPAGLKVNIPTNCWGTPIETPCDTVIFVGDKTYDCGVRRFYVKVDKGKVTLFHSNNGGTEVEMCACRDMSRTDKEVYLIYFDGKVLTCTIGEQCQ

SEQ ID NO: 202 - DNA, 972 bp, Nanoarcheum equitans
atgcactataggagagcaatgtcaataacctttaaaaatagtaaacataaaagaaatatgcgaagatctatagaattaccaatatctgtagtgctcttcgcaataataggtttaatggttttttctatattattgggattcattcccaaggttttaggctctttgttaggaggttttatgtcctctgtttccgctactaaagcgcaatcgatagaggaagcaagagctatttgccagcaatggtgttctttagctaaaacttctagcacaccagagaaattccttaatagtgatttttgtacaaaatatgttgctatcccttcccaaactagaaacgcttgtggagtaaaaaatacaaaacccaacctatatgtatgtaacggcatatacaaatacgacagtgggaatagccaatgggtgctccttacgggatgtgaaaaatatgaaactggctcccaatataatttaagcagtgatgctaattgcaaaatcacgaattttaatgtagattgcagaagaaacggttttgttctaaaatgcaatgttgaattgaaaacagaaggctcttgcacagtagatagtgttaaattattttatggaatcgccaatggtttcgttgttgctttagctggcgaagacgaaagtagtgtaacaataaaaaatggcggaagctacaccataagccaatctaaatctctatcattaaattccggttcttacaaaggagaaatagagatagaagatccttgttatactaaataccattacgataaagcgagatgtgaaagcgatagtgcttgctcttggttaaaaactggtaaaagcattgaactaaaaaaatgttacgaaaacccaataggagtggtatgctctttgcccccattattagttggaacagttcaatatagctgtgcaagtgatgaaaaaggttgtttctgtatagggagcgatggttctattctaagaaagtga

SEQ ID NO: 203 - protein, 323 aa, Nanoarcheum equitans
  signal (1)..(67)
MHYRRAMSITFKNSKHKRNMRRSIELPISVVLFAIIGLMVFSILLGFIPKVLGSLLGGFMSSVSATKAQSIEEARAICQQWCSLAKTSSTPEKFLNSDFCTKYVAIPSQTRNACGVKNTKPNLYVCNGIYKYDSGNSQWVLLTGCEKYETGSQYNLSSDANCKITNFNVDCRRNGFVLKCNVELKTEGSCTVDSVKLFYGIANGFVVALAGEDESSVTIKNGGSYTISQSKSLSLNSGSYKGEIEIEDPCYTKYHYDKARCESDSACSWLKTGKSIELKKCYENPIGVVCSLPPLLVGTVQYSCASDEKGCFCIGSDGSILRK

SEQ ID NO: 204 - DNA, 483 bp, Nanoarcheum equitans
atgggtgagatagcaattagacttttagttacaggaggtaaagcgacccctggcccaccaatagggcctgcacttagcccattcaaaataaaccctggtaaggttgtcgcagaaataaacaaactcactaaagaatatgaaggtttgcctgtacctgtagaaataataataaatccagaaaccaaggaatataaaatcatcgttggtttgcctccaacttcagcattattaatgaaagctgctggagtaacaaggggcccacaaagaacagttcacgaatgggttggtaatgtatctatgaaagatgttgtggaaatagctaaaaagaaaatagattctatgccaactagttctttaaaagcagcagtcaaatctgtattaggtacagcgagggccactggtataaaagttgagaacaaagacccaaaagaagtaactaaagaggttgacgaaggaaaatgggaccatattataaatgaatag

SEQ ID NO: 205 - protein, 160 aa, Nanoarcheum equitans
MGEIAIRLLVTGGKATPGPPIGPALSPFKINPGKVVAEINKLTKEYEGLPVPVEIIINPETKEYKIIVGLPPTSALLMKAAGVTRGPQRTVHEWVGNVSMKDVVEIAKKKIDSMPTSSLKAAVKSVLGTARATGIKVENKDPKEVTKEVDEGKWDHIINE

SEQ ID NO: 206 - DNA, 1713 bp, Nanoarcheum equitans
atgaatagaattatatcaattaatggaccattagttatagccaaagggaaattctctatatttgaagtagttagggttggagaagaaaaactaattggggaagtaattggtatagagaatgacaaagcttatatacaagtttacgaagacactaatggcttaaaagttggtgagcctgtatttaatacagggaaaccattaactatagagcttggtccaggtttgttagccaatatttttgatgggttgggacgaccactaaaagatatctatgaaaaaacccaatccatatatattccaaaaggaattgatttaccaaccctagatagaaaaaaagtatgggaatttattccaaaaaagaaaaagggcgatacaataaagggaggcgatataattgggactgtaaatgaaaatggatttgaacatagaattattgtcccaccaaatgttgaaggcaaaatagaagagatatatgagggcaattttaccatagaggaaactattgctatagtaaatgggaaaccaataaaattatatcatgaatggcctattaggaaacctcgtccttataaagagaaattagattataattatccatttattactggtactagagttttagatataatgtttcctatagccaaaggaggtagtgctgctgttcctggcccatttggttcgggcaaaacagttctaaaccaacaaatagcaaaatgggccgatagcgatatagttatatacatcggttgtggagaaagaggtaatgaaatgaccgaagttttagaagaatttccaaaattaaaagatcccaaaacaggtaaacctttaatgtatagaactattttgatagccaatacctctaatatgcctatagccgctagggaagcatctatatatttgggcgccacaattggagaatactttagagaccaaggttatagtgttgttgttaatgctgattccacttctagatgggccgaagcgttaagagaaatctcttctaggcttggagaaatcccaagcgaagaaggatacccggcatatttgttaagaaaattggccgaattctatgaaagatctggaagagtaagaacattaaacgatttagaaggctctttaacaataattggagcagtttctccccctggaggagatttcagcgaaccagtaactcaaaataccttaagattagtaggagcactatgggccttagattctaaattagcttacaaaaggcattaccccgcaataaactatttaatatcttatacaaaacaatgggagtttgttaaaaaatatttcgaagagctttatgaagatgtgatagagattagagaagaattctttgccatactaaaaagggaatctgaattaatggatatagtttcaatagttggacctgatgctttgtccgacaatgaaaaaatctatttacatatgggaagaataataagagagggctttttacaacaagatgcattcgatgaaaacgattcttattcgcctttagaaaaaaccatcgagttaatgagaataatccataaatattatgttacagtaaagcaattattaggtaaaatcccattagaagaaatagaacagaaaggaatacacgaaaaaataataaaactaaggtataaaagtttaaaggaattcagagaagaaataaaagctattgaacaagagattttatctcttctaaattctcaatag

SEQ ID NO: 207 - protein, 570 aa, Nanoarcheum equitans
MNRIISINGPLVIAKGKFSIFEVVRVGEEKLIGEVIGIENDKAYIQVYEDTNGLKVGEPVFNTGKPLTIELGPGLLANIFDGLGRPLKDIYEKTQSIYIPKGIDLPTLDRKKVWEFIPKKKKGDTIKGGDIIGTVNENGFEHRIIVPPNVEGKIEEIYEGNFTIEETIAIVNGKPIKLYHEWPIRKPRPYKEKLDYNYPFITGTRVLDIMFPIAKGGSAAVPGPFGSGKTVLNQQIAKWADSDIVIYIGCGERGNEMTEVLEEFPKLKDPKTGKPLMYRTILIANTSNMPIAAREASIYLGATIGEYFRDQGYSVVVNADSTSRWAEALREISSRLGEIPSEEGYPAYLLRKLAEFYERSGRVRTLNDLEGSLTIIGAVSPPGGDFSEPVTQNTLRLVGALWALDSKLAYKRHYPAINYLISYTKQWEFVKKYFEELYEDVIEIREEFFAILKRESELMDIVSIVGPDALSDNEKIYLHMGRIIREGFLQQDAFDENDSYSPLEKTIELMRIIHKYYVTVKQLLGKIPLEEIEQKGIHEKIIKLRYKSLKEFREEIKAIEQEILSLLNSQ

SEQ ID NO: 208 - DNA, 1215 bp, Nanoarcheum equitans
atgattttacctccgagagggacaaaggattttactccagaattggccatattatggaaagaaatagtatcaaaaatagaaagcgtttaccaaaaatacgggtttgatccaattattactccaattgtagaatattgggacacattaaaaggcaaatatggggaagaagcagagaaaaaagagatatggcggtttagggtaccacaaagcaaaaaatggtatgcattaaaatatgaccaaactgtgccattggctaggtatttcgcaaggtttaggcctaaattgccttttaagagatatacgatagatagaacctttagatacgatgaaccacaaaaaggaagatatagagagttttggcaagccgatgccgatatagttggttctccttatcctgaagcggatgcagagatattaaatatgatgatagaggcttatgaaactttaggatttaatgtttatctaagagtttctgatagaagggcattagaatcactaatagaaaaagtaggagaaaaggataaatttattgaaatagctagaattatagataagtgggacaaaataggagaagaaggggtattagaaaaactaaagcaaataacggataaagctgaaaagataatagaattgctaaaagagaatcctgaagaattttatccaaaggagttttgggaaattattgatttagtggaaaagaaaaataaaataaaaattgatataaaattagccaggggttttgattattatactggtatggtttatgaagtgtggattgaaggttttaatagagccctgggcggaggtggtaggtacgataatctaatagggatattttctaaagaaaaaattcctgccgttggagggagtataggtattaacccattaatcgatgttggtttagaaaaaggtatatttaatctaaacaaaaagacatatacgcaaatcgcagttatttatatagaggttttcaaagaagcatggagaattgccaataaattaagagatttgggattaaatgtttatattgatttgcttagaagggactttaagaaacaaatggaatatgttatagagaaagacattaggtatttagttattgttggtaaaaaggatttagccaataatttagtaacatttcaagataggctaacaagggaaagaaagaaaatacctattgagaatttagaagagataaaatctcttgttcaatag

SEQ ID NO: 209 - protein, 404 aa, Nanoarcheum equitans
MILPPRGTKDFTPELAILWKEIVSKIESVYQKYGFDPIITPIVEYWDTLKGKYGEEAEKKEIWRFRVPQSKKWYALKYDQTVPLARYFARFRPKLPFKRYTIDRTFRYDEPQKGRYREFWQADADIVGSPYPEADAEILNMMIEAYETLGFNVYLRVSDRRALESLIEKVGEKDKFIEIARIIDKWDKIGEEGVLEKLKQITDKAEKIIELLKENPEEFYPKEFWEIIDLVEKKNKIKIDIKLARGFDYYTGMVYEVWIEGFNRALGGGGRYDNLIGIFSKEKIPAVGGSIGINPLIDVGLEKGIFNLNKKTYTQIAVIYIEVFKEAWRIANKLRDLGLNVYIDLLRRDFKKQMEYVIEKDIRYLVIVGKKDLANNLVTFQDRLTRERKKIPIENLEEIKSLVQ

SEQ ID NO: 210 - DNA, 981 bp, Nanoarcheum equitans
gtgatagataatcttttttccgaaatagaagagacaaaaaaagccgatataaaagtaaaacccacaaaggaaaaccttattgctttagcattattagtttaccctttatatgaaagaaaattctatgtaaaaatatcgttttccgatgagtttatggtaaacggtaggaaattcagtataaaacaagctttggaatttcataataaatatgctttaaataaaagaaaagatctaatatttttgcttactaaacaaggggtagagcccaaaaagggattggctatccctggtatatttactaggcctttaataaaatcgctagaacaaagcttttttatttatatcccaggggttactgcagatagtagaggggtaaagaaatttttaagagagtctaatttagatcctcaaaaagcatggataaaatttagtgatctaagcgacaaagataaggataaactagtaacaaacataattctaagaaggatggatctagaattaataaaagatgcagaaaacgtgttaatggaccattatttgttgggggaaaacctttttgatgatttgattttattagatttggccttagatgctttaatagaaaaaaaggaataccattatgcttttggtttgttaatgaaaaggcaaagatccttagacatagctacccaatatttgaataattatttggaaaaggtttcctctattctaaaagagtttttcgaaggcaaaatagagagaatagaaaaacataatactatatttgctttatttaaagagcacaacattggtttagaaagagcaatagaaataatccataaagaaactggtaaaacaataataggggtgtttccaaaaaggaacaaatccttagtaatagcagcaggtaattacaaaaaatttttacctgtcccaagagtagagatagataaagaccctaaacaagtttttgaagagttacctaacaaaataagaatatga

SEQ ID NO: 211 - protein, 326 aa, Nanoarcheum equitans
MIDNLFSEIEETKKADIKVKPTKENLIALALLVYPLYERKFYVKISFSDEFMVNGRKFSIKQALEFHNKYALNKRKDLIFLLTKQGVEPKKGLAIPGIFTRPLIKSLEQSFFIYIPGVTADSRGVKKFLRESNLDPQKAWIKFSDLSDKDKDKLVTNIILRRMDLELIKDAENVLMDHYLLGENLFDDLILLDLALDALIEKKEYHYAFGLLMKRQRSLDIATQYLNNYLEKVSSILKEFFEGKIERIEKHNTIFALFKEHNIGLERAIEIIHKETGKTIIGVFPKRNKSLVIAAGNYKKFLPVPRVEIDKDPKQVFEELPNKIRI

SEQ ID NO: 212 - DNA, 381 bp, Nanoarcheum equitans
atgccaaaagcatctgtagttaaaatagtagtaagtgatcctaaaagtgggaaagcaatacaaatagaaactaaagaaccccaatggctatatggcaaaaaaattggcgatacaattgatggttctaaaataggtttagatggatatgaattaaaaataactgggggtagcgatatcgctggatttcctatgagaaaagaagttgaaggcgcagtaaggaaaaaaatttggtggtgggtggacaaaagaatgagggttaaaaaaacagtatacggcaatacgataagcgatgagattgtacaagtaaacacagttatagtaaaatatggggaaaagcctttcgaagaaatatataacgaattcaaatctaacaagcagtga

SEQ ID NO: 213 - protein, 126 aa, Nanoarcheum equitans
MPKASVVKIVVSDPKSGKAIQIETKEPQWLYGKKIGDTIDGSKIGLDGYELKITGGSDIAGFPMRKEVEGAVRKKIWWWVDKRMRVKKTVYGNTISDEIVQVNTVIVKYGEKPFEEIYNEFKSNKQ

SEQ ID NO: 214 - DNA, 1113 bp, Nanoarcheum equitans
ttggaaacaaagagagcatgtgatttaataaaaaaatacgattctcgtttatacaattatttcgaatcagaatacggcccttgtagtaataaaaaagaatgggccgaactatatgttagtttagtattggcccaactatcagctttgtgctacaaatattactatggaacccatcctgaagataaattccattacaatgttttcccatgcttttatgtttatatcgatggcaaatataatgtaaaagaatacgaaataacactattacaaattttgaaaggctattattttaattatatagtaaaatcagaaggagatcttgctagtagtttatacaaattcgtatctaaatttgtaaacataaaaaaaattgacaataaaatattgattaataacaaattcgagaaaaaggatattgtttattatgatgctagcaatgataaggacgaaataaatattaacaacaatggaatcttaatagcatatgttgatgggcttgaaagttattccataagcgaaaccccctcgatattaatgggtttaactggatctatcattatagaagctgctatagattctatcacttttaagggtagttctatatttaaagctgcatacaaaagattgaaagaccttggagaagaagaggctaagagggttataaaaatgtttttcaaatctttaaataaagtaacaaaagagttgagaactaaatatatatactctattttagattctattatggatacggaaacctatagaggttatttgaaaaagataagagaaaaagctttagaatttaatcccatgggtacagtaattgttgcaagtttgcctaatataaatatagatatgtctcaaattttatccaactatataagcgaatctaaagatgtaacaaaaaatactattactttagaattgaaaccaggtattaatctaaggctttgctattgtaatcaaaatggttgtttagtaggtaattccgaatcgctaaaatttaaatgcgaaggagaaatgatatatggtttatgcgatagcgaaccaggggaatatattgttgcaccaattatatattacaaaaaaataaactgcgatgagggtaaaagttaa

SEQ ID NO: 215 - protein, 370 aa, Nanoarcheum equitans
METKRACDLIKKYDSRLYNYFESEYGPCSNKKEWAELYVSLVLAQLSALCYKYYYGTHPEDKFHYNVFPCFYVYIDGKYNVKEYEITLLQILKGYYFNYIVKSEGDLASSLYKFVSKFVNIKKIDNKILINNKFEKKDIVYYDASNDKDEININNNGILIAYVDGLESYSISETPSILMGLTGSIIIEAAIDSITFKGSSIFKAAYKRLKDLGEEEAKRVIKMFFKSLNKVTKELRTKYIYSILDSIMDTETYRGYLKKIREKALEFNPMGTVIVASLPNINIDMSQILSNYISESKDVTKNTITLELKPGINLRLCYCNQNGCLVGNSESLKFKCEGEMIYGLCDSEPGEYIVAPIIYYKKINCDEGKS

SEQ ID NO: 216 - DNA, 918 bp, Nanoarcheum equitans
atgagggtaaaagttaaagatgataaagtacaactatatatagaggattacgaggatctagttgatttgtttttgacaatagaaaaaggcgatattatttgtgctaaagtccctatagttataaaaaaagagtatgaaaaagagaaaaccgttaaatatgtctgtatagaggttgaagagttaaaattagatccttattatggattaaggatttatggtagaatagttaaaggcgacaaagatgttcctttaactaaaatgtccataaatttaaatgttggtaaaactatagaaacccaatataatgaaaaatggttaaaatttaaaccaaaaaatgttgtatatgttttgtgtgttgacgatgaaaagggagtattagcggaaatatatagaaacaaatataaaataataaaagagtattatagagaaggcgaattaagtgattttatagatcaaatactaaaagacataaaagagaacacaatagtatgcgggccaaactttattagagatattatctcttcgaaagcgaatgtgccatcaatctatgcttcctatgggggagaagaaggaattagagaactattgaaaaacaaggaattctttaatttgataaaagatgaaatagagaaacaaaaaatagagaaattggaaaaagcgttccagctattatataaagggcaaatctctattggagaagaagccatagaggacataaaaattgggaatgtagaagaggtttatgtccatagggattatttaaaaaggcttaaagagagaaaagaagaagatctattaaatacaatcctggttttgcccaaaaaatataacgccaaaatctatataatagagggcgatagtgatttggcaaaacaattgtattttctaaaagtcattgtgaagaaaagatggttttaa

SEQ ID NO: 217 - protein, 305 aa, Nanoarcheum equitans
MRVKVKDDKVQLYIEDYEDLVDLFLTIEKGDIICAKVPIVIKKEYEKEKTVKYVCIEVEELKLDPYYGLRIYGRIVKGDKDVPLTKMSINLNVGKTIETQYNEKWLKFKPKNVVYVLCVDDEKGVLAEIYRNKYKIIKEYYREGELSDFIDQILKDIKENTIVCGPNFIRDIISSKANVPSIYASYGGEEGIRELLKNKEFFNLIKDEIEKQKIEKLEKAFQLLYKGQISIGEEAIEDIKIGNVEEVYVHRDYLKRLKERKEEDLLNTILVLPKKYNAKIYIIEGDSDLAKQLYFLKVIVKKRWF

SEQ ID NO: 218 - DNA, 1059 bp, Nanoarcheum equitans
atgattataaaagaagggctagcaaaaatagagattcccgattataataatatatcgaaagagatgcccgtattttataatccattgtcttctataggaagagatatagcggtagaagtagctagcaaattagggataaaaaatgttttagacccaatgagcgctagcggtattagggggattagatactatttagaatcaaatataagggaagtgcattttaatgatataaatccaatcgctatcgaatatataaaaaagaatttggaattaaacaatataaaagaaggaaagataattatttctaatttagatgctagagcgatagagcaaaaatatgaatatatagatatagatccattcggctctgcaactccttatttgtatttaataaacaatacttctaaatatttggctataacctatacagacacagcagtttggaccggggaaaagcataggaaagcctacataagatacaattttaatgtaataaaaaccccaatcaaacacgaaattggagtaagagggttggtggcccatctaataaacaaaggcgccgaaatcgagagagctttaattccaatttatgcgcatagcgcttaccattattatagggtatacatgcttaaaagaaaaggatcaaatagaatagaaaaactgaaatctcaaataggttatttatattattgccctaaatgctattatatatcggaaagcgaaagcgtatgtccctattgtaaaagaaaaatgtttagaataggtcccttatatttgggaaagctatgggcaataaaattagataaaagggattatttcaataagcaatcaaacaaaataatagaaagaattaacgaagaatccgaaatagataaaccctattattatgaattgccatctatagctaaggccttaaaaactaacattcctcctatggataaaataatggaaaaactaaaggaattgggttataaagtagagagaacacattttagcgaaaatggtataagaactaacgctccctattatataattaaaaccatcttttcttcacaatga

SEQ ID NO: 219 - protein, 352 aa, Nanoarcheum equitans
MIIKEGLAKIEIPDYNNISKEMPVFYNPLSSIGRDIAVEVASKLGIKNVLDPMSASGIRGIRYYLESNIREVHFNDINPIAIEYIKKNLELNNIKEGKIIISNLDARAIEQKYEYIDIDPFGSATPYLYLINNTSKYLAITYTDTAVWTGEKHRKAYIRYNFNVIKTPIKHEIGVRGLVAHLINKGAEIERALIPIYAHSAYHYYRVYMLKRKGSNRIEKLKSQIGYLYYCPKCYYISESESVCPYCKRKMFRIGPLYLGKLWAIKLDKRDYFNKQSNKIIERINEESEIDKPYYYELPSIAKALKTNIPPMDKIMEKLKELGYKVERTHFSENGIRTNAPYYIIKTIFSSQ

SEQ ID NO: 220 - DNA, 1263 bp, Nanoarcheum equitans
atgaattcaaaagatattctaatttatgcctctatctctagtttattgctaatgtcttttatactattccaaacccataggtatatagaaataaatgctgtggcaataacaaacaatagtgcagaaatagtaccaataaaaatagaagcaactattggacaaggcaattatgttaacttaaactcctatatagataacaatttccaatattcgataaaaatgtccgatgaatttattaaaagtataggaatagaaaatatataccaatacaaaattagttttgaaagcaatagctattattcttctggtagctctgcagggttagctttaactataggcaaactattattgataactgctccgcatttcgatgtaagaaattatgtttttaccggagtaatattgccttttggtattattggagcagtttctggtattgataaaaaatatgaagcagtattaaaaaataataaaacccttattcatggaaacgagaactttaagaaaggcttatattttaacaatgttttcgaagtgtataaatttataacaaaaagagatttggcgaaaaagcataaactgaaaatccccgaatggtataacaaaattatgagagaaataactttagaactttgtaataaaactgaaagcatagcaccaaattcaaaggaattccaaaaagctttagaagcaattaagaaaggccattactatagcgcggcatctttttgctttatagctaattacaaatacgataaaaaccatacaaaattggaaattgctgaagaaataagagaaataaagaaaaaaatagaaaaaatcaagaataaggtattaacaatatatgatgctgaagcattaggaatggctttagatagattaaaagatgcagagcaaaacataaataataccagttattcctattggcgtttacaaacagtaaaaggttggttaaaatttgttggcaatactactggtataaagaattattgtccaaacatggatctttccacttattatatatactatccttttgagacaaaaatcaataagctaacctgttattatgatgtggagaaaactttgtttaaggtatatgcaactgttttactaacctataatgtttcagataaaaaattgttatcagtattaccatactatcaaaagcatttctctttatggggatatacgaatttggaatattataattataccaaagacaaaacacatttaattattgcacttacaagttttagcatatga

SEQ ID NO: 221 - protein, 420 aa, Nanoarcheum equitans
  signal (1)..(27)
MNSKDILIYASISSLLLMSFILFQTHRYIEINAVAITNNSAEIVPIKIEATIGQGNYVNLNSYIDNNFQYSIKMSDEFIKSIGIENIYQYKISFESNSYYSSGSSAGLALTIGKLLLITAPHFDVRNYVFTGVILPFGIIGAVSGIDKKYEAVLKNNKTLIHGNENFKKGLYFNNVFEVYKFITKRDLAKKHKLKIPEWYNKIMREITLELCNKTESIAPNSKEFQKALEAIKKGHYYSAASFCFIANYKYDKNHTKLEIAEEIREIKKKIEKIKNKVLTIYDAEALGMALDRLKDAEQNINNTSYSYWRLQTVKGWLKFVGNTTGIKNYCPNMDLSTYYIYYPFETKINKLTCYYDVEKTLFKVYATVLLTYNVSDKKLLSVLPYYQKHFSLWGYTNLEYYNYTKDKTHLIIALTSFSI

SEQ ID NO: 222 - DNA, 657 bp, Nanoarcheum equitans
atgcattatatagagcaaaaactaatggatggtttccatatagataatagacctttattagaatataggcccataaaaataaaagaagaccaaaatagggtatggctttctttaggcaatacccaagttattgcaggcctatctattagtgaagaagagcctatggaaaagggtaaagccaatctaatagttaatgctgatttctctcctattgcggggaaagaatatttccaaggccctccgacagaacaagatttaatattggctcgattaatagatagggcattaagaagctctaatgctatagccttagaaaaacatgttattgatgaaaacaaagtaaaatctttctatattgatgttatcgttttagaagacgatggcaatattttagacgcatcaatgttagcagtagtaaaactattggaaaaagctaacctattagagagaaaacccctatatataagcttttacaaatacaaaaacataatatttgtagacccaacaaaagaagaagaacaaattagcaatgccaaaattagtatcgcaatagatggggaaaacattgttagcatacaaaaagactatggtagcttcgatgaaaatgagatagaagagttaatagatctagctttcgatttgtataaaaaattatga

SEQ ID NO: 223 - protein, 218 aa, Nanoarcheum equitans
MHYIEQKLMDGFHIDNRPLLEYRPIKIKEDQNRVWLSLGNTQVIAGLSISEEEPMEKGKANLIVNADFSPIAGKEYFQGPPTEQDLILARLIDRALRSSNAIALEKHVIDENKVKSFYIDVIVLEDDGNILDASMLAVVKLLEKANLLERKPLYISFYKYKNIIFVDPTKEEEQISNAKISIAIDGENIVSIQKDYGSFDENEIEELIDLAFDLYKKL

SEQ ID NO: 224 - DNA, 984 bp, Nanoarcheum equitans
atgccagctaatctaacaccagaatttataaaagcttgggaaaaagctaaagctgccaaaactttagaggaaaggctaaaatatctatacgaagctctatatctatgtccaaaacacaaaggtacagaaaagctattagctttacttaaaaaagagatatccaaaactaggcaagagattgaaaaaaagaaagaggaagctaaaaaattatcaaagaaaggtatctccaaagaaggtgacataatggttgtattagttggggggcccaatagtgggaaaacatattttataaaccaattagttaatactgattttccttcaacagaattgccatatgaaacagtccaaccaattagcgttatatacaattacaaaggtgcaaaaatccaactaatagaatatccaagccattttcctaaagagtatagctatttgttgaaaaatgctgatcttattatattgtttgacgaagaaggaaagcggtttttagaaaagatgggcataaaattaggagaaaaagaaaacaaaatcaaaataataaaagaacccacaggaggaataaaaattatgggtccattaaaagctacaaaagaaatagtaagtgaaattctaaaaaactatgggatatacaatgcaactgtaatagcatacaaagaagcaactatctcagatttaattgattatttggaaggttcatctcataaaccttatatagatttaactaaagagaaaatagataatatcggggaagaaataattaaaagggctaacaaaattttggttttcactaaagatacagagaatggtttagtattagataaaggctctacagtaaaagatttagtcgaacgaatacataaagatatgctaaaaaactttagatttgcgagggtttggggcaaaagcgtcaaacaccaaggccaaagagttgggttagaccatagattagagcattacgatagagtaataatatacacaaaataa

SEQ ID NO: 225 - protein, 327 aa, Nanoarcheum equitans
MPANLTPEFIKAWEKAKAAKTLEERLKYLYEALYLCPKHKGTEKLLALLKKEISKTRQEIEKKKEEAKKLSKKGISKEGDIMVVLVGGPNSGKTYFINQLVNTDFPSTELPYETVQPISVIYNYKGAKIQLIEYPSHFPKEYSYLLKNADLIILFDEEGKRFLEKMGIKLGEKENKIKIIKEPTGGIKIMGPLKATKEIVSEILKNYGIYNATVIAYKEATISDLIDYLEGSSHKPYIDLTKEKIDNIGEEIIKRANKILVFTKDTENGLVLDKGSTVKDLVERIHKDMLKNFRFARVWGKSVKHQGQRVGLDHRLEHYDRVIIYTK

SEQ ID NO: 226 - DNA, 441 bp, Nanoarcheum equitans
atgaaatatgaaaacataataataagaattataggctatgactgggatgatttggaagaattaaaagaatcactaaatcgattcataaaagaattagacaaaaaggataaacctttaatagagataagatctagcactgggttggtatcagataaattatatactttagaaatcaaaactagcaaaaacaaagtaataaagaaaattttggaagaaataattaaaaggattgaggataaaaaagaatttttagactacataaaacttagatgggagaataatgtattgtatttaaggtttgataaagactatttcttaagaaaagacaaactaatccccacagaaggaggagatgtattatatataagaataagctttcccggttatatgaaaagggacgaaataattaaacatttggaagaaaagctaaatgccagctaa

SEQ ID NO: 227 - protein, 146 aa, Nanoarcheum equitans
MKYENIIIRIIGYDWDDLEELKESLNRFIKELDKKDKPLIEIRSSTGLVSDKLYTLEIKTSKNKVIKKILEEIIKRIEDKKEFLDYIKLRWENNVLYLRFDKDYFLRKDKLIPTEGGDVLYIRISFPGYMKRDEIIKHLEEKLNAS

SEQ ID NO: 228 - DNA, 1062 bp, Nanoarcheum equitans
gtgggaatgggaattatgataatcgcagatcctatatatagaattatagaagttgatgacaaactaaaacctataatagatagcaaagcattccaaaggcttagatatataaaacaaactgctttgacttatttggcttatccatctatgaaccatacgagatttgaacattctttaggagtatactatttaacaaaactattagcaaaccaattagatttggatacaacatactattctttagttggtttattgcatgatatagggcattgcccattctcccatacaggggaaatggcattgcaaaaatatctaaacaaaaatcatgaggaattatcatactattggttagaaacattgaaagaagaaatagaaagtttaggttacactataaatgagatatacaaagggattattggagaaaacatagttacttttagcttaggcacagataggttagactatttgcaaagagattcctattattctgcaaatggcaatccaaatataaattatcattatgttataaaaaatatcgttaaaatcgataatacctatgcttttagagagaaagccttatctttgatagaacaaattttaatattaaggagccatttaagaaaaacagtttatttccataaatctagtttagctggtgatgttttattagagagagcaataacaaaattgttggattattataagccaatggaaatagcattaatgaacgattatgaattagttggattgtttaaatattataaaataggggaatgggaaagaatagaaaatagggatttacctaagcttctcgctaaatacaatgaagaaaacgaagatttggaagagcaattggaaaaaagcaatatcaattattataaaattagaatagtctctaaaaacaaaatagaggacataaaaatatatgataatgaaataaaaccgataacagaagtatcgcaagtggcaaaatatttagaatacatcgataaccaattgtatggctattattattttgtcgataggaaggactggcagaaagcccttaaactaatacaataa

SEQ ID NO: 229 - protein, 353 aa, Nanoarcheum equitans
MGMGIMIIADPIYRIIEVDDKLKPIIDSKAFQRLRYIKQTALTYLAYPSMNHTRFEHSLGVYYLTKLLANQLDLDTTYYSLVGLLHDIGHCPFSHTGEMALQKYLNKNHEELSYYWLETLKEEIESLGYTINEIYKGIIGENIVTFSLGTDRLDYLQRDSYYSANGNPNINYHYVIKNIVKIDNTYAFREKALSLIEQILILRSHLRKTVYFHKSSLAGDVLLERAITKLLDYYKPMEIALMNDYELVGLFKYYKIGEWERIENRDLPKLLAKYNEENEDLEEQLEKSNINYYKIRIVSKNKIEDIKIYDNEIKPITEVSQVAKYLEYIDNQLYGYYYFVDRKDWQKALKLIQ

SEQ ID NO: 230 - DNA, 1134 bp, Nanoarcheum equitans
atggcaaaagttactccctgggaggttcaaataaaagatgaaagcgactaccaaagattaatagaaatttttggggtaaaacctatcgatgaaaaattaaaggaaaaactaaaagaatatacaaaggaattgcacccattgattgagagaaacatattttatgcccatagagatttagatttggtattaaaggactacgaagaaggaagaggcttctttttatatacaggcatagctccaagcaaagggaaaatgcatataggacatttagttccttttatattaactaggtggttccaagagaaatttgatgttaatgtatatataatgtttccagacgaagaaaaatattgggctaaaaaagttgatgattataaagaggttagaagaaaaataaaagaaatgcatgcaaaatatattgcggcattgggcttcgacccagacaaaacttttatgttcattaattctgaatatataaaacatttatactctgcagcgataccaattgcgaggcacattaatttatcacaagcgagagcagtatttgggtttaatgatagcacttctgtgggtttagtattttatacagtattacaaatagtaccaacatttttcgaaaacaaaaggcccctaatacctgcaggtatagaccaagacccatattttagacttcaaagagacatagctccaaaactaaataaatacaaagctgcagaaatattaagcaaaatgatttggggattaagggggccatatactaaaatgtcctcttccgatccagattcggcaatatttttagatgatagctatgaagaagtaaaaagaaaaataatgaaagccttttctggagggcaacctactttggaattacatagaaaatatggaggaaacccagatatagatgttgtgttcttttggttgaaagcattgtttgaggaagatacaaaaaaattgaaagagttggaacaatcctatagagaaggcacactaactactggggaactaaagcaatacgctatcgaaaagatatggcgtttcttaaaagatttacaagagaaagctaaaaaagtagatataaataaatatttctacgatgggaagttagctaaacaaatgtgggaatgggaattatga

SEQ ID NO: 231 - protein, 377 aa, Nanoarcheum equitans
MAKVTPWEVQIKDESDYQRLIEIFGVKPIDEKLKEKLKEYTKELHPLIERNIFYAHRDLDLVLKDYEEGRGFFLYTGIAPSKGKMHIGHLVPFILTRWFQEKFDVNVYIMFPDEEKYWAKKVDDYKEVRRKIKEMHAKYIAALGFDPDKTFMFINSEYIKHLYSAAIPIARHINLSQARAVFGFNDSTSVGLVFYTVLQIVPTFFENKRPLIPAGIDQDPYFRLQRDIAPKLNKYKAAEILSKMIWGLRGPYTKMSSSDPDSAIFLDDSYEEVKRKIMKAFSGGQPTLELHRKYGGNPDIDVVFFWLKALFEEDTKKLKELEQSYREGTLTTGELKQYAIEKIWRFLKDLQEKAKKVDINKYFYDGKLAKQMWEWEL

SEQ ID NO: 232 - DNA, 318 bp, Nanoarcheum equitans
atgtttttgttccccaaaatgaaatgtgattcctattgcgcattttggattatttttatagttagcataatagtatggaatttggcccctttttataaagggttgttaacatttatatcaataattgttaccctcttgttgataataagattattctattggaaaaaagtgaaacaaataataaagctatatcaaatgcaggccaaactatctaaagctttgaaagaaggcaaaataaatatggaagatctcgctaaggaattggatttatctataatggatgagcttttaaaagatctcatgaggaagaaaaaatga

SEQ ID NO: 233 - protein, 105 aa, Nanoarcheum equitans
MFLFPKMKCDSYCAFWIIFIVSIIVWNLAPFYKGLLTFISIIVTLLLIIRLFYWKKVKQIIKLYQMQAKLSKALKEGKINMEDLAKELDLSIMDELLKDLMRKKK

SEQ ID NO: 234 - DNA, 1014 bp, Nanoarcheum equitans
atgaattatgagtatgttgctaacaaaatcaaagaattggaaagcccagtattggttataactgataccgaccccgatggaaagagcagtgctttgctgatgaaagctatattagataggctaaacaagcaatacaaaatatatcctaggcctttcgggaaaaaagaaaagcaatatggttatataatgaatttgatacaaaaagaaaagcccaattctattattatgttagattacccaatcgatgatagcactttaaacaaaataggggaaagttttagcaaacctataatatatatagaccaccacaaaagaagtgttcctcaattaaaagataacatagtttattttgacataagagctctaaaattggaaatcacttctacttctggggctgtatatagaatagggaaagccctatttaacgatttcggattatatagtaatatagctgcgattggagcgataggcgattttatgtttgacccaataattaaagaagacctagaaaaatactatccctctttgtatcaaaagggttctattactcccatattcatttatttgtttgatttaatatcctattcgccttttgaagatttaatgaatttcccatttcccaaaaatgtaaaagcaatgggcaaaacctttttctataggtataaaaatttggctgatgccgttaaatactatgaaagcgattgtgttttagtttataaagtgaaaagctctactagttttgtttccacttatttaagtggtctatacccagataaaattattgtagtgtttactaaagtggtaactggtttattagataggttgcctttcgttaatagatattatagagcaagcatcagaaaccaatctagaaatttagatgtaggaaaaatagtaatgcaatataaaaacaaaatccaaggtgggggccacccaagggcagcagcaattatgttggaatcaaaatatttagaccatttcatttcttatctagagtcgaaatgtaatcaataa

SEQ ID NO: 235 - protein, 337 aa, Nanoarcheum equitans
MNYEYVANKIKELESPVLVITDTDPDGKSSALLMKAILDRLNKQYKIYPRPFGKKEKQYGYIMNLIQKEKPNSIIMLDYPIDDSTLNKIGESFSKPIIYIDHHKRSVPQLKDNIVYFDIRALKLEITSTSGAVYRIGKALFNDFGLYSNIAAIGAIGDFMFDPIIKEDLEKYYPSLYQKGSITPIFIYLFDLISYSPFEDLMNFPFPKNVKAMGKTFFYRYKNLADAVKYYESDCVLVYKVKSSTSFVSTYLSGLYPDKIIVVFTKVVTGLLDRLPFVNRYYRASIRNQSRNLDVGKIVMQYKNKIQGGGHPRAAAIMLESKYLDHFISYLESKCNQ

SEQ ID NO: 236 - DNA, 459 bp, Nanoarcheum equitans
atgaaaattgctattactggcataccaggagtaggaaaaacaacaatagctaaagcattagctaaaaagttaggctatcaatacattgacttaaataagctaataatagaaaaatacaaaccaaaatatgattggttttatgatagctatataatagaagacgatatgttaaatatagaaattcctgacaatagtgtaatcgattcccatttgtcccatctattagatgtggatttagtagtatacctaatagcagatccgaaaataatagaacaaaggttaaaagagaggggctatagctttagcaaaattttcgaaaatatctgggcccaaaccgctggtataatagaaagcgaattggttggaaaaaaatacataaaaatagatgttaccaataaagatgttgatactatagttaaccaaattattgattacatttcgactctagataagaaatga

SEQ ID NO: 237 - protein, 152 aa, Nanoarcheum equitans
MKIAITGIPGVGKTTIAKALAKKLGYQYIDLNKLIIEKYKPKYDWFYDSYIIEDDMLNIEIPDNSVIDSHLSHLLDVDLVVYLIADPKIIEQRLKERGYSFSKIFENIWAQTAGIIESELVGKKYIKIDVTNKDVDTIVNQIIDYISTLDKK

SEQ ID NO: 238 - DNA, 735 bp, Nanoarcheum equitans
atgccagcgatagctatattatctggcaaaggtggggttggtaaaacgacaatatctgttaacttagcaaaagtcctttccacaaagtttagaactttattaatagatggaaaccttactactccaaatgttgctatatttttaggattaaacccattatatacattgaatgatgtattaagaggagacataaatgtaagcgaagctatagtaaaaaaagacaatctatatgttttgcccgctagcattagattaaaggatttgcaaggcataaacccagaaaaaataaaagatgtaattgaaagcctaaaagagcattacgattatataataattgatactgcccctggtttaggaagagaaatgcgttatagcattttaggagcagacgaagcgattgctattactactacagatgcctcttctttggttgatacaacaaaggccatggctttagcagaacaaaaaggtatctctattaaaggggcaataattaatatgtatgatggctctgttaacccttcaacaatagaagatttcctagagacaagcattttaggaataatcccttacgatccaaccataaaaagatatacaatgaaaaatcaaactatcgaaaataaaaaaacaaaaggggctattgccataaaacgaatagctgaaaggttaacaaatgagaaattcgtttatagcgaatcattcattgataaattattgtctttcttaaaaagatga

SEQ ID NO: 239 - protein, 244 aa, Nanoarcheum equitans
MPAIAILSGKGGVGKTTISVNLAKVLSTKFRTLLIDGNLTTPNVAIFLGLNPLYTLNDVLRGDINVSEAIVKKDNLYVLPASIRLKDLQGINPEKIKDVIESLKEHYDYIIIDTAPGLGREMRYSILGADEAIAITTTDASSLVDTTKAMALAEQKGISIKGAIINMYDGSVNPSTIEDFLETSILGIIPYDPTIKRYTMKNQTIENKKTKGAIAIKRIAERLTNEKFVYSESFIDKLLSFLKR

SEQ ID NO: 240 - DNA, 768 bp, Nanoarcheum equitans
atgattgtttatactacagtgtggcccctactaattatattatttatgctctccggttgtatacaattacagcaaacaaaacctaaaaaaatagaaccaaaacccacttttagcaaatttttatatataactgttccaaagtatagtgaaatcccaataaaggacaataaaataaaactaacgtttttagtaaccaatagggggagattgcccataaactttacaatagttagtcctcaaatctcttatactccccaacctaaaacagtattcccagataaaacagaggcattttattatgaaatagataaaagtaaacttgctggtaacactacagcagatttttatatagtatactattcgcccttctatatatatggaaaaagaactggaataattagcgaaatccctatagaggagaaaaacaatataataaaaattacaatgcctcaagataaggtatacaatgtaaccctatttatgaaggggtgccaattaaatactggggctatagaaaacagcaataacgataatttttacaatttaacagtgtttaaagagtggtctttgtattgcaaacctaataaaatagttttaggtgctttcgttaactcttataaaatatattcattaaaaataagatgtttaactagctgttctgccaatatattatacgctttaagctatttcgaatctacaatggaagaaaacctgtataattatattagctatttggcaaacaagctaggtttaactactagtcaatag

SEQ ID NO: 241 - protein, 255 aa, Nanoarcheum equitans
MIVYTTVWPLLIILFMLSGCIQLQQTKPKKIEPKPTFSKFLYITVPKYSEIPIKDNKIKLTFLVTNRGRLPINFTIVSPQISYTPQPKTVFPDKTEAFYYEIDKSKLAGNTTADFYIVYYSPFYIYGKRTGIISEIPIEEKNNIIKITMPQDKVYNVTLFMKGCQLNTGAIENSNNDNFYNLTVFKEWSLYCKPNKIVLGAFVNSYKIYSLKIRCLTSCSANILYALSYFESTMEENLYNYISYLANKLGLTTSQ

SEQ ID NO: 242 - DNA, 366 bp, Nanoarcheum equitans
atgttattcgagaaaaataaaaataaagatgatttggcattcaaatttttagaggctattaaagaggaagcggaagaaatcccaaaagaagagccaaaacaagaggttaaagagagtgtaaaagagaacaatattgaacaaatagagaagccttctttatttatacacattgatgattatgaagagttgaacaatttattaacagagatgcaaaaatatttagaagaattaaaaaaattgttaaatagctataaccaattacatgaggaagaaaccaaattgttagaggaatggggaaacaaaatagatgatagcaaagagagaatagcaaagatattggagattttgcaagtgaaagctttttaa

SEQ ID NO: 243 - protein, 121 aa, Nanoarcheum equitans
MLFEKNKNKDDLAFKFLEAIKEEAEEIPKEEPKQEVKESVKENNIEQIEKPSLFIHIDDYEELNNLLTEMQKYLEELKKLLNSYNQLHEEETKLLEEWGNKIDDSKERIAKILEILQVKAF

SEQ ID NO: 244 - DNA, 351 bp, Nanoarcheum equitans
ttggaattaacattaatttggacccaattaaaagagattagagagaaaaaatttataatagttcaaaacatgaaagagaaggcaaagcaaatacaatctatattaaaggttataaaagagaagttgcctgcagtagataaaaaagagatagaaaagctatttgttaaaaaaacagagaaacaaaaagaagcaaaacccgaagtaaagaaggaaaaagaagaaaaaccaaaagaagagaaaaaagagaagccaaaaaagcagagcaaaaagaaaaccaaaaccgataatataaatgatttaaaaaaacaaatagaagagatagaaaaaatgttagaagaattaaaactctaa

SEQ ID NO: 245 - protein, 116 aa, Nanoarcheum equitans
LELTLIWTQLKEIREKKFIIVQNMKEKAKQIQSILKVIKEKLPAVDKKEIEKLFVKKTEKQKEAKPEVKKEKEEKPKEEKKEKPKKQSKKKTKTDNINDLKKQIEEIEKMLEELKL

SEQ ID NO: 246 - DNA, 762 bp, Nanoarcheum equitans
atgcgtataatattcctaggtagcggtggaggtagaaatgtttttgctacccaaattagagggacaggcggttttataatagataatggaaaaacttatatacatgtagacccaggagagggcgcattagttagggcaaaaatgtataacatcgatataagaaaggttagatatatattggttagccatgtccatttagaccatgccaatgatgttaatgcagtaatagatgctataaccttggggggtataaaaaagagaggtattttattagcaagtgaaagcgttttaaaagaaaccccagaatttggctacccaatagttaggcgcaattatttaaactatttagaccattacgaagttctaagagaatacgaagacgaaaatctaaaagtaaaatcaataagaacaaaacatacagatccatatacattaggaatgaaaatagaagtaaatgataaaacaataggttatactgcagatacaaggtattttccggaattggccaagtttttcgaaaatgtagatgttttaatagctaataccttgtatccttttggttttactagcaataaacatttaagcttagacgatgctattaggttagcaaaattggcaaaaccgaaaatgttaatactaacacatttcggtaaaagaataataaaagaggggccagcaaaaatggcagaaataattgaaaaaagaaccaatgtaagaactattgcagctagagatggactaatagtaaatttagagttttaa

SEQ ID NO: 247 - protein, 253 aa, Nanoarcheum equitans
MRIIFLGSGGGRNVFATQIRGTGGFIIDNGKTYIHVDPGEGALVRAKMYNIDIRKVRYILVSHVHLDHANDVNAVIDAITLGGIKKRGILLASESVLKETPEFGYPIVRRNYLNYLDHYEVLREYEDENLKVKSIRTKHTDPYTLGMKIEVNDKTIGYTADTRYFPELAKFFENVDVLIANTLYPFGFTSNKHLSLDDAIRLAKLAKPKMLILTHFGKRIIKEGPAKMAEIIEKRTNVRTIAARDGLIVNLEF

SEQ ID NO: 248 - DNA, 1245 bp, Nanoarcheum equitans
ttgttcttgtatatgaaaataaagtttgaaataaaatataaagatgctgctggcaaagttggaaaaataaaactaaatgggaaaactattgaaactccatatctattcccagttattaacccatttaaacaagaattgcccataaaagagatcaaaaaaatgggtttcaacgctataattactaatgcatatattttgtttaaaagaaaagaagaagtaatggaaaaaggtattcataattttttgggcttcgatggtattattgaaaccgattcaggagcataccaattattgcaatatggcgatatagatatagaaaatgaagatattatttatttccaaaacgagattggggtagatataggtaatattttggatattccctcctatggtaaaacatacgaagaagctaaaaaagatttagaaataacattagaaaggctaaaacaagccatagagatggcaaattttgcaatcaatggaccaatacagggagacaaatatttagatctaagatacaaagctttggaagaagtttccaaattagatattgacatatatgctatagggggaatagtcccatatatgaaccaatataaaatagaaagcttagcaaaaataatagggcccttattattagatataccaagggatagaccagtccatttatttgggttgggccatccattaattatgcctttgtttgttgctttgggcgcagatctatttgattctgcttcctactctttattcgcgaaagaggagagaattttaactcctttcagaacatttagattggaagatttaacagatagttatatactagattacaaagcgagcgaacttaaagggatggaaaataaaacttacataatagcgaaacataatttattagttcttagaaacgaaataaattttataagagatttgattaggcaaaataggctatgggattatgttataataaaggcccacgcacacccttctatttattttgctactaaatatgttttagaaaacttgtatgaaaaattaaaagaacacgaaccaataacgaagagagtaggtattctataccagggcgaattaaccgaattaagaagcgatttaagatatgcaatagaacaattgaaaaagctcgataaaagccaaataaatgacatattagattatgcttggcctttcggccaattcgaaattggggaaaaagacaaaaaattattctttcaaagatttcttaaataa

SEQ ID NO: 249 - protein, 414 aa, Nanoarcheum equitans
MFLYMKIKFEIKYKDAAGKVGKIKLNGKTIETPYLFPVINPFKQELPIKEIKKMGFNAIITNAYILFKRKEEVMEKGIHNFLGFDGIIETDSGAYQLLQYGDIDIENEDIIYFQNEIGVDIGNILDIPSYGKTYEEAKKDLEITLERLKQAIEMANFAINGPIQGDKYLDLRYKALEEVSKLDIDIYAIGGIVPYMNQYKIESLAKIIGPLLLDIPRDRPVHLFGLGHPLIMPLFVALGADLFDSASYSLFAKEERILTPFRTFRLEDLTDSYILDYKASELKGMENKTYIIAKHNLLVLRNEINFIRDLIRQNRLWDYVIIKAHAHPSIYFATKYVLENLYEKLKEHEPITKRVGILYQGELTELRSDLRYAIEQLKKLDKSQINDILDYAWPFGQFEIGEKDKKLFFQRFLK

SEQ ID NO: 250 - DNA, 699 bp, Nanoarcheum equitans
atgcatatgcctaagaatataaaggttaaaccccacaaacttgaaggtgtatatataggaaataacaagtttttgttaacgaaaaacttagtaaaaggtcaaaaggtttatactgaaagaatattcaaatctaaaggggaagaatatagagaatggattccatttagatctaaattagcatcagcaataaagaaagggctaaaaacttggcctttcaaaaaaggaactatcgtattatatttaggaatagcctccggtactacagcttctcatataagcgatataattggggaagaaggaataatatttggggtagaatttgctcctagagttttaagagaactaatgtttgtagctaaaaaaagaaaaaacatagtaccaatattggcggatgcgaaccaaccagaaacttaccaacatatagtagtgcaaagcgatgttatctatcaagatgttgctcaaccccaccaagttgagatatttttgaaaaatttaagatttttcgctaagccaaacgcaattggatttttggcggtaaaagctagatcaatagatgtaaccaaagatccaaaggttatatttagagaggtcgaaagaaaattaagagaggcgaaattacaattattagaatcaataaggttagacccatatcataaagaccatatgatgtttgttgtaaaagttccaaaagcatggtag

SEQ ID NO: 251 - protein, 232 aa, Nanoarcheum equitans
MHMPKNIKVKPHKLEGVYIGNNKFLLTKNLVKGQKVYTERIFKSKGEEYREWIPFRSKLASAIKKGLKTWPFKKGTIVLYLGIASGTTASHISDIIGEEGIIFGVEFAPRVLRELMFVAKKRKNIVPILADANQPETYQHIVVQSDVIYQDVAQPHQVEIFLKNLRFFAKPNAIGFLAVKARSIDVTKDPKVIFREVERKLREAKLQLLESIRLDPYHKDHMMFVVKVPKAW

SEQ ID NO: 252 - DNA, 1179 bp, Nanoarcheum equitans
atggtaggcgaattatatcgatttattacagattttggtgtaatagagggctacataataaaagaagagcccaattattatttaataaagttaaaaaacggttataatattggaataaaaaaatcccaaataaaagagatggaaaatttgaatgaaaaaataaaagttgggcaattcccaaaaagaaaacccaaaggaataggaaatcttggtttcatttatactggaggtactataggaagtaaagtcgactatttaactgggggggtatcagctataatggatatagaggaactattagctatagctgatttgccttacgatataaaaataattgattccccttttgtaaagttttccgaagacctaaatccaaaggattgggtagaaattgtaaaatctatagaaagaacatacaaaaaaggggctgaaggtattatagttgcgcatggcacagatacaatgcatttttcttctgcttatgcttattatgctttagaaaacccaatccctatagcttttaccggggcacagagaagcagtgatagagcttcaaccgatgcggtaataaatttgtttgcttcttctatttatgccaattccaatattggagaagtagcaatagtgatgcatgaaacaattaatgatgatacagctatcgccattagaggtatatctgctagaaaaatgcattccacaaggagagacgcatttaaatcgataaacgaagagccattagctaggatttattatccatctggtaaattagagataataaacaaaaaatataggaaaagaagcgataaagagatggttgcaaaaccatatttagatactaaaggtgcattgatttgggtataccccggtttcgatccttctattttagaatactatagaaactatagaggtataataattgctggtactgggatgggacacacatccaaagagctaatacctatgttaaaagagttatcaaaagatttatttattggaataacaacccaatgtatttatggtataacccacccatatgtgtattctagaggaagagagctatcaaaatttgctacttatttacaaggcaccccagaaaagaattatgtaaaactattgtatgtcttggggaaagaaagcgatttagatggcataaaaaaagagatgaaaagattgccttga

SEQ ID NO: 253 - protein, 392 aa, Nanoarcheum equitans
MVGELYRFITDFGVIEGYIIKEEPNYYLIKLKNGYNIGIKKSQIKEMENLNEKIKVGQFPKRKPKGIGNLGFIYTGGTIGSKVDYLTGGVSAIMDIEELLAIADLPYDIKIIDSPFVKFSEDLNPKDWVEIVKSIERTYKKGAEGIIVAHGTDTMHFSSAYAYYALENPIPIAFTGAQRSSDRASTDAVINLFASSIYANSNIGEVAIVMHETINDDTAIAIRGISARKMHSTRRDAFKSINEEPLARIYYPSGKLEIINKKYRKRSDKEMVAKPYLDTKGALIWVYPGFDPSILEYYRNYRGIIIAGTGMGHTSKELIPMLKELSKDLFIGITTQCIYGITHPYVYSRGRELSKFATYLQGTPEKNYVKLLYVLGKESDLDGIKKEMKRLP

SEQ ID NO: 254 - DNA, 384 bp, Nanoarcheum equitans
ttgaaatcctatttattgttaatttatttgcctagagatacagaaataaaaacaaaagcgaaaaaattctttttgaaaaaaggctattatgtatatgtgggctcaatgaaaattgggattaaaagagttattaggcattttaagaaaaacaagaaaaaacattggcatatcgattttctcttagaaaaagcccaaccaatatttgctattcttttggatttagaagaaaaagagttatcaaaactaatggaaaattatggtaaacctatagaaggattcggtaataccgatttagataccaaatcaaatttgtttttccttccttctaacgagatagccctcgataaacaaagcatctatattacaatcgataaaatcggttaa

SEQ ID NO: 255 - protein, 127 aa, Nanoarcheum equitans
MKSYLLLIYLPRDTEIKTKAKKFFLKKGYYVYVGSMKIGIKRVIRHFKKNKKKHWHIDFLLEKAQPIFAILLDLEEKELSKLMENYGKPIEGFGNTDLDTKSNLFFLPSNEIALDKQSIYITIDKIG

SEQ ID NO: 256 - DNA, 1902 bp, Nanoarcheum equitans
atgaaaatactaggaacaaaatgggttggccatgatagctctgtctttttgttagaccctgaaaaccaagagatattcgcggcctcaacagagagatatactagaattaaacacgatccttttcatattggtccgatactaaaagaactaaatttagaaactagaagagacataaagcatataggtattcccctcatggattggtatatgggatttccgggttttcttaacaattatcatagaatagtaaggattagaatagctgaaatcctaagagaaatgtacaagccaaaatacataaaagactggaaaaaaataatggacaagaagaaaaccgaaatatttaaagatgctctaaaaaagggcaagttttctaaattattaaaggaatctatattattggttttaaccaatactataccactaccaaaatttattgacagaaaattaactttgaaagcgataaatgatttctttaagcgatattcgattaatgcaaaaatagaattttacgaccaccacctatcacatgcagcttctgcatattattttagtccctttaatggtaaagaagcaatagtatttactttagatgggtatggggatggtaattttagcacagtatggtattttaatggaaaagaaaggaagttactgcacaatagtccagcatggattatgggtaaaagatttttgtccatatataaaagtagcaaagatcaccaattttcctatttcaatactgtaagcattggaaatgtgtatagcttgtttacctatgtattagggtttaccccaggttctgacgaaggcaaaacagaagcattagcagcatatggtaaaccagacaaagagttgtatggtctattaaataaagcgttcccaataaataaagacaaattaaggtgggaaataaataaagaaattgttaaaaagtattttacaataaaaagagtcgatttactaaaaaaatggaaagaaagaattggtgatgagaatttcgctgctacaatacaaagatggctagaagataccgtagtgaattatttaaatttggtatatgagaaatataaaataccgagactagcaatggctggaggagtagtagctaatgtaattatgaatttgaatatattcgaaagaactccctttgaggaattatatatattcccagcaatggctgatgatggcacttctgctggagcagcggtattaaaagctatagagttaggctatgatataagttggttaaaagattatgaaatgccttattggggcccaagttattcaaaagaagatgtagaaaaagcattaaagagatgggctgacaaaatagagtacgaatatattggagataaatggccagaattagctgcagaaatggttgctaaagggttaatagtcgctatattccaaggaagaatggaatttgggccaagggctttaggtaatagaagtatattagccgatccaagagatcccaaatctagggataagctaaatttaaaagtaaaaagaagaccttggttccaacctttctgtccatctgttttagaggaagaaagagagagattatttgaaaaatcctacaaacataaacatatggcaatagcttttaggttgaaaaaagaatattgggacaaactaccctctgctaggcatgtcgatggaacagcgaggccccaatttgtcgaggaaaaagataaccctaattactatagattgttaaagaagctaaaagaattaacagggtttggagtagtagtaaatacttctttcaatttgcatgggagaaccatagtaagaacccctgaagatgcattaaccgattttatcgattgtaatatagatgctttgtttatcgagggctatctcgttagaaggaaggaaaaacaaatttga

SEQ ID NO: 257 - protein, 633 aa, Nanoarcheum equitans
MKILGTKWVGHDSSVFLLDPENQEIFAASTERYTRIKHDPFHIGPILKELNLETRRDIKHIGIPLMDWYMGFPGFLNNYHRIVRIRIAEILREMYKPKYIKDWKKIMDKKKTEIFKDALKKGKFSKLLKESILLVLTNTIPLPKFIDRKLTLKAINDFFKRYSINAKIEFYDHHLSHAASAYYFSPFNGKEAIVFTLDGYGDGNFSTVWYFNGKERKLLHNSPAWIMGKRFLSIYKSSKDHQFSYFNTVSIGNVYSLFTYVLGFTPGSDEGKTEALAAYGKPDKELYGLLNKAFPINKDKLRWEINKEIVKKYFTIKRVDLLKKWKERIGDENFAATIQRWLEDTVVNYLNLVYEKYKIPRLAMAGGVVANVIMNLNIFERTPFEELYIFPAMADDGTSAGAAVLKAIELGYDISWLKDYEMPYWGPSYSKEDVEKALKRWADKIEYEYIGDKWPELAAEMVAKGLIVAIFQGRMEFGPRALGNRSILADPRDPKSRDKLNLKVKRRPWFQPFCPSVLEEERERLFEKSYKHKHMAIAFRLKKEYWDKLPSARHVDGTARPQFVEEKDNPNYYRLLKKLKELTGFGVVVNTSFNLHGRTIVRTPEDALTDFIDCNIDALFIEGYLVRRKEKQI

SEQ ID NO: 258 - DNA, 1044 bp, Nanoarcheum equitans
atgaattatcgatgttatagaatgaacataatcgatttagcacaaaacattttatcttattataataaaggaaaaaccgaattagatttagataaagatgttattttgtttttggttgatggtctatccatagaacaagcaaaaaagattaaaaaagatttccaaactatagaaacattaaacataccatctactgctccggtaataactagtttaaaccttattaaatatcctggcgaccatgggatctacgcttggtattcctattcagagattttcaaagaggttattgctcctgtagcttatgtttctagtttaggtccaataaatacaaagaaacatttaattcttgaagggtttgaaacaatataccaaaaaatcgatgcagaaagctatgtattcattcctaaagaatattctaatagtttatattcccaatatgtttactatggcgcacagagggttggctatttaagtttgtccgaagtaatagtaagcataagaaaaataacaagaaaaaagggcaaaaaattcatttttatatattatcctaagctagatagtttaaaccatttatatggcccaaattccaaacaatcaatagaagaaattaagtttttgaaatattttattaacagattaaagaagttcaaatataatttaattgttacagcagaccatggttttatagaattagatacaaagaaaagaattcctatagaggtattcaaagaattagatatagaatttgttgctggagaacagagaaacctattcgtaaaacctaaagaggaccccaatacaatatatgagatatttgaaaagctaaaaaatgaattagaattggacatcgtaattgaacaactcaataagaaagcgataaagagattgctaggctcttattccgatagagtaaaacatctaatagatagtatttttatacaatttaaagacaatggctttattgataggggatataactttttaggagaccatggcggggcgagcaatatagaaagaaagatccctttaattatttattaa

SEQ ID NO: 259 - protein, 347 aa, Nanoarcheum equitans
MNYRCYRMNIIDLAQNILSYYNKGKTELDLDKDVILFLVDGLSIEQAKKIKKDFQTIETLNIPSTAPVITSLNLIKYPGDHGIYAWYSYSEIFKEVIAPVAYVSSLGPINTKKHLILEGFETIYQKIDAESYVFIPKEYSNSLYSQYVYYGAQRVGYLSLSEVIVSIRKITRKKGKKFIFIYYPKLDSLNHLYGPNSKQSIEEIKFLKYFINRLKKFKYNLIVTADHGFIELDTKKRIPIEVFKELDIEFVAGEQRNLFVKPKEDPNTIYEIFEKLKNELELDIVIEQLNKKAIKRLLGSYSDRVKHLIDSIFIQFKDNGFIDRGYNFLGDHGGASNIERKIPLIIY

SEQ ID NO: 260 - DNA, 330 bp, Nanoarcheum equitans
gtgaaattgaaaatcgtgactgtaaaaattggagacgaaagagtagaattagcgatcccagaagaagacgaagttataggtattgtagagcaagcattgggatgggcccactatagagttaaatgcttcgatggggtagaaagaatatgcagagtaccaagaccaagaagatggactaaagataaatttagattcaatgttgcagaaggaaattacgttttagtaaaaccatggcccaatagtaaagacaaaggcgacataatttataaatatgaccgcaaacaagtggaagcacttaaaaaattgggttatttagaggaagaattttga

SEQ ID NO: 261 - protein, 109 aa, Nanoarcheum equitans
MKLKIVTVKIGDERVELAIPEEDEVIGIVEQALGWAHYRVKCFDGVERICRVPRPRRWTKDKFRFNVAEGNYVLVKPWPNSKDKGDIIYKYDRKQVEALKKLGYLEEEF

SEQ ID NO: 262 - DNA, 894 bp, Nanoarcheum equitans
atgcccatatataacagtgttatgagggttgcgaaattggctatagataaatacatagaaatgctagaaaacttaggaatagaagtaaagccattaaacaaaactggttacgaaggctataagataataatccctaaaaatactaaaataaatgtgccaataagcttagtatatgtttccacaggcgaaaatcaaaaagttttgaataaagttatagtaaaagagggggcatttgctaaaatttatacctattgtacttctctaaacgaagggtaccatttgggtaaaaccattgccattgttaaaggccatctagaaagtgcaaaaatccataaaatagatagcaaatccacgatagtttctttgaataggtattatgtaaagaaaggtattctaaacaactatttgataagcaatgattctagcgggaatagtataaatataaacaaattctatggaattcaatctaatataggagagtatgttatttacaaacaaaaagagggtttattaaaaacagatagtaaggcctatataaaggattcggtagctatattaaaatctagggttgtaacctatgatgggaaagtaataaacaaaactttaattagtgggacaggcaaaggctatagctcttgcgatggcataatattagggaaaggcaaaatatacactatgccggcattgaatactgtgaaagaaggcgaatactaccatgaagcatctgtaggaaaaataaacgaacaggcgttattgtatttaatgtccaagggcatagatgaggaaaccgctaaaaatatatacattaggggattcttatttagggatttacccgaagatgagcaattaaaattcttaatatattcgatatttcaaaattcttcctctaaataa

SEQ ID NO: 263 - protein, 297 aa, Nanoarcheum equitans
MPIYNSVMRVAKLAIDKYIEMLENLGIEVKPLNKTGYEGYKIIIPKNTKINVPISLVYVSTGENQKVLNKVIVKEGAFAKIYTYCTSLNEGYHLGKTIAIVKGHLESAKIHKIDSKSTIVSLNRYYVKKGILNNYLISNDSSGNSININKFYGIQSNIGEYVIYKQKEGLLKTDSKAYIKDSVAILKSRVVTYDGKVINKTLISGTGKGYSSCDGIILGKGKIYTMPALNTVKEGEYYHEASVGKINEQALLYLMSKGIDEETAKNIYIRGFLFRDLPEDEQLKFLIYSIFQNSSSK

SEQ ID NO: 264 - DNA, 558 bp, Nanoarcheum equitans
atgttacccaatttggataacctaaaggaagaatatcaaaaattggaagaaaagaaacaagaaattgttgaccgtagtattagaatgtctaagctatcgaaatctcttatttattctatgattagagaagattacaaaagtgccgacaaatataaagaagagctaactaatttggcaaaaacccaaattgaagagttaaaaaagtatccaatgttttattctaacggttttataggcttacaagaatatgtagaagcgctggccttatattattacataaaagaaaatagaatcccatcaaaagaagagcttggagtagacacatgggtttatttattcggtatcggcgatatagctggggaaatattgagaaaaagcagcgaagaactaattaaaggcaatatcgaatatgctaaaaaggctaaacaagatttagaaagcttatatttggatttgctttatatagagttaaagaatttcgatttgagaaggaaattagattatgtaagcaatataataaacaagctaatagagttcattatatggaaatccaaatag

SEQ ID NO: 265 - protein, 185 aa, Nanoarcheum equitans
MLPNLDNLKEEYQKLEEKKQEIVDRSIRMSKLSKSLIYSMIREDYKSADKYKEELTNLAKTQIEELKKYPMFYSNGFIGLQEYVEALALYYYIKENRIPSKEELGVDTWVYLFGIGDIAGEILRKSSEELIKGNIEYAKKAKQDLESLYLDLLYIELKNFDLRRKLDYVSNIINKLIEFIIWKSK

SEQ ID NO: 266 - DNA, 1068 bp, Nanoarcheum equitans
atggaagagtttatccgagctgcacaggaaagagcaaagatggatgaaaaacaacaaatagatgaatatcttaatagaataaagaaaaaaattaaagttattggtgtcgggggtgctggatgcaatactattaataggttatatgaattaggcttacaagatgttgaactaattgcagttaatgcagatgtaaaagatttggctaaaataaaagctcataaaaaagtattaataggagaagaagttactcgtggtttgggtacaggaagagaccccgaattaggagaacaagctgcaagggaaagtgagaaagtaataaaagagctattgcaaggaacagatatggtttttattacttttggccttggtgggggcacaggaactggggctggcccagttattgctgatatagccaaacaaatgggtatactaacagtagccgtagtgagttggcccttttctagtgagggtaatttaacattaagaaacgcccaatggggattagcaagattagaagaaactaccgatacacatatagttataccaaacgataaattattagaaatagcgcctaatttaccaattgctgtagcatttaaattaagcgatgaagttttagctaacactattaaaaaaaccacagagttaatattaaaacctggccaagtcacaagagatttcgcagatttgaaagtaatattagagaatggcggtttaggtatggttggctttggagaatccgattcggaaaacaaagcattagaagctattgagagagcaataaacaatccattattggatacagatgttagtggggcgaaaagggctttgttgcacatagttgcaggccccgactttaaaacagaggaattaaacaaaatattagaatatgttagcaataaactagacccagaagcgaaattattatggggtctatggattgaagaggaaaagaaaggcaaagtcgaaataatgattttagtaacagagctaaagaatgtacccgattatctaaaaataagcgaaaaaagaaagaagaaagatgaattaggaatagatgttatctaa

SEQ ID NO: 267 - protein, 355 aa, Nanoarcheum equitans
MEEFIRAAQERAKMDEKQQIDEYLNRIKKKIKVIGVGGAGCNTINRLYELGLQDVELIAVNADVKDLAKIKAHKKVLIGEEVTRGLGTGRDPELGEQAARESEKVIKELLQGTDMVFITFGLGGGTGTGAGPVIADIAKQMGILTVAVVSWPFSSEGNLTLRNAQWGLARLEETTDTHIVIPNDKLLEIAPNLPIAVAFKLSDEVLANTIKKTTELILKPGQVTRDFADLKVILENGGLGMVGFGESDSENKALEAIERAINNPLLDTDVSGAKRALLHIVAGPDFKTEELNKILEYVSNKLDPEAKLLWGLWIEEEKKGKVEIMILVTELKNVPDYLKISEKRKKKDELGIDVI

SEQ ID NO: 268 - DNA, 600 bp, Nanoarcheum equitans
ttgcaatataaaaagcataaaatatggcggttatatacaatgctagcgtatataactttatttttttacattttaatatgggtgatctttgctttaggtatcatagttgacaaactccaagcaaacaagcaaaactttttagattttctgtacgatgttagagaggcagagatggcatgcaaagctgtaaaagtaagtgcaggctaccttttaaggtattatatagaagattccactattcgaaatcagactggaaaatatcttgatttagttgcccttacaaacaaactaaaaaagaacttaccttcaaaaattacggagctatatagagaagtggtttgtttttatcctatctacatagaagcaaacaaatctaaggtagtgtacatatatcatgcaacaattttaggaaaatatggaagatatttttgtaaaattataggtggtgaatttataagtggtagggggtatatccttatagttccttcggaggagagttgtgatacttctcaaatatactgtgcagaaaagtacatatactcttgttttagagacgaaaaaaataaagagattgtactaagagcgaacaaaattagataa

SEQ ID NO: 269 - protein, 199 aa, Nanoarcheum equitans
MQYKKHKIWRLYTMLAYITLFFYILIWVIFALGIIVDKLQANKQNFLDFLYDVREAEMACKAVKVSAGYLLRYYIEDSTIRNQTGKYLDLVALTNKLKKNLPSKITELYREVVCFYPIYIEANKSKVVYIYHATILGKYGRYFCKIIGGEFISGRGYILIVPSEESCDTSQIYCAEKYIYSCFRDEKNKEIVLRANKIR

SEQ ID NO: 270 - DNA, 861 bp, Nanoarcheum equitans
atgcgaggcgcgattagcacaatagtatatattcttattggactaataggggcagcattctctttaatattaatgaatagtgttttcgaaaaaactaaaattccatcgaagcaatgggaatcaaatataattaaagagcacgctaaacagatatgtgctaactataaattctctttagattgttctatattaaaaaatccaaaaatattgcacatgtgttataaagatttggtttctgttttaccccagctatacgctaaatgtataaatgacctgccctatattgttataccagtaagtttagcattaaaaggcaaaaaaacaatatgtttatttacttacataaagctaaacaccttcgatattctatattataacgttaatccctataagttattaccccaatacttgtattgtgaagatgtgttcgaatacaataatgtaataccatccaaagatgaaggtagttgcttagtaaaaaggagtgcaggtaatgaatactatttctgtatctctcctgtttctaaagaaatttgtaacaacattggaggggaattcgcacaaaactatttttgcaatccatttgatgagataatttacaacaatcctccaatcaaaattgaagaaaaaaccagcactatagaaattactactatactatgtcaagggaattttgagataaaaaacgggaaaattgaaggtagctgtgactccatttctacatctaataaggaggaagtaaaaaaatatattgaagggagccctgtaactggtgttccgacaatggaaactataataaatgggaaaaagtatagttgcaatataaaaagcataaaatatggcggttatatacaatgctag

SEQ ID NO: 271 - protein, 286 aa, Nanoarcheum equitans
  signal (1)..(30)
MRGAISTIVYILIGLIGAAFSLILMNSVFEKTKIPSKQWESNIIKEHAKQICANYKFSLDCSILKNPKILHMCYKDLVSVLPQLYAKCINDLPYIVIPVSLALKGKKTICLFTYIKLNTFDILYYNVNPYKLLPQYLYCEDVFEYNNVIPSKDEGSCLVKRSAGNEYYFCISPVSKEICNNIGGEFAQNYFCNPFDEIIYNNPPIKIEEKTSTIEITTILCQGNFEIKNGKIEGSCDSISTSNKEEVKKYIEGSPVTGVPTMETIINGKKYSCNIKSIKYGGYIQC

SEQ ID NO: 272 - DNA, 1527 bp, Nanoarcheum equitans
ttgctattatttaaaaaccaaccaaaatataataaaatgagagcgatattcgatgaaattaaatatataatactaatattattggctattgcaatagttggttatttatctttttcaacattgaaaagtaaaaagaacatagaacaacttactagcgtggaattggtaaaatttgccacaccaaaagaaaaccctactattaatatagagtatccaattaatttacaacccatagctaggttagaagataggtataacaaaataaaagctttagaaatattatttagagaagaccttccagaagggttttatttgccattggctgtaacaaaagataaccattgcatacaagcagtatataagtttatttatagggaaaatataaaagaagaggacaaaacgaaattaaaaaaagcggttataacaaatattgacaattacaattattatttaacttgttataaagctttatccgaaaaggaaggttttataacctatttcttagaacaattaaaattgggtaatactttagtagattgttatgtatacaataaacaatattattgtgttacccctgttccattagaggtttgtaaacattttggaaaacctatgcctctaaggttttgcactagtttcctctatgctataaacacagaagtatactatgatactcagtaccacatagactcttccgatgggactagagtggaaaataaagatatacaaaatgcttttagcagttggataggaagccttggattagagggtaggctgaatgattataaaaaaactatagattactgtagtggtaaagattgtgacatctttactgctattactaattatgaaaaccaaaagaggagagacttttttgaaagcttggccaatagtttagaaagtgctataaaagactattttgattgcggtagtggttttaaaacaggttctaacagtaaattatacaatctagctaacgagataaataatttgttggggtgcaagattatagaagataacattgtcgataccattgatactccagtgaggtgtcttagttctgacaaaaggctctccgatgtcttaaacgatttttgtttaaacaaagatgatttgaagagtaatgataacatcaataacttcaaaaaaaattataactgctatgtgaaagcaatcaacacattattgcataatatagcaatactaagggacaatgctatacatgttaataacttttatacattgaaaatagattgtattagaaaaataaaagaatgcgccgaaaagaaaaatttggattttaacaccttgctctctagggtaaaagatgcaatagttaatcaaaaaaaagtatactgcgatataggaaatttgttcaacaatggtaaaccattggatactatcgaagaaagatatttacatatacagaatagtggagaggctattattgataaaagtaacaaaatcgaaaccggagatgtatgtgttattgatttagaaacatgcgaggcgcgattagcacaatag

SEQ ID NO: 273 - protein, 508 aa, Nanoarcheum equitans
MLLFKNQPKYNKMRAIFDEIKYIILILLAIAIVGYLSFSTLKSKKNIEQLTSVELVKFATPKENPTINIEYPINLQPIARLEDRYNKIKALEILFREDLPEGFYLPLAVTKDNHCIQAVYKFIYRENIKEEDKTKLKKAVITNIDNYNYYLTCYKALSEKEGFITYFLEQLKLGNTLVDCYVYNKQYYCVTPVPLEVCKHFGKPMPLRFCTSFLYAINTEVYYDTQYHIDSSDGTRVENKDIQNAFSSWIGSLGLEGRLNDYKKTIDYCSGKDCDIFTAITNYENQKRRDFFESLANSLESAIKDYFDCGSGFKTGSNSKLYNLANEINNLLGCKIIEDNIVDTIDTPVRCLSSDKRLSDVLNDFCLNKDDLKSNDNINNFKKNYNCYVKAINTLLHNIAILRDNAIHVNNFYTLKIDCIRKIKECAEKKNLDFNTLLSRVKDAIVNQKKVYCDIGNLFNNGKPLDTIEERYLHIQNSGEAIIDKSNKIETGDVCVIDLETCEARLAQ

SEQ ID NO: 274 - DNA, 771 bp, Nanoarcheum equitans
ttgtttagatttagtaaaatgatctcttggttaggttctctaataatactaataatgtttttaggagtagttagtatagtattcaacaacacagcccaatccataaataaaacaaccaaaggaataagcgataagataaaacctttggaatttgattataatccttataggtatttcttaattataagcgatactttttacccttatgctatcgatgaatcccctatgccttacgcaaaggtatcctatttattagcccacgactctttaggcctatgggaaagcgataggctaataccaaaagagtatagaggtaatttattggctttaataagatatggtatagtaggaactaaaccagtagtagatagctattgttgtagggtcgacagttctaaaggtacaatattattagaagcaaaccaaccctattgttataggattggaggtaaaatccttagatggaggcactgtatagattatataaatagcttaccatccattgatgaattagtaatagttttagatagcctattcccaattcaaaaagataatatatactattatactccttctgggtatatagtagatggatcgccaacaatgaaattgcttactgttaactattatgtctgctatttctatagcagaccaagcaatgtacaaatagatacagaagttagaaagataattactgtgtatagagcttcatccgatagcgctaaaggctattgctattatttaaaaaccaaccaaaatataataaaatga

SEQ ID NO: 275 - protein, 256 aa, Nanoarcheum equitans
  signal (1)..(29)
MFRFSKMISWLGSLIILIMFLGVVSIVFNNTAQSINKTTKGISDKIKPLEFDYNPYRYFLIISDTFYPYAIDESPMPYAKVSYLLAHDSLGLWESDRLIPKEYRGNLLALIRYGIVGTKPVVDSYCCRVDSSKGTILLEANQPYCYRIGGKILRWRHCIDYINSLPSIDELVIVLDSLFPIQKDNIYYYTPSGYIVDGSPTMKLLTVNYYVCYFYSRPSNVQIDTEVRKIITVYRASSDSAKGYCYYLKTNQNIIK

SEQ ID NO: 276 - DNA, 1710 bp, Nanoarcheum equitans
gtgagggccctatccaatataatatggctaatctctgcaatagttgttgctctaatgtctatagcaataatatctttcagttttttcaaaacagtaaatccattagcggctttatctaaacaagcaaaagaagttggagaaactgctacagagaattttgccccatctatagaggagaagcccatagagtttactttatcttataaatatgatccctttaggagggctcccccttatagtaagcctatactagagaaatacacttggaaactttcccaaactttgctctcttctaattctttcgaaattaactttgttgataaagatgatcatcctaaaactaaaaatatagacataagtgcaggaaaattaaatatagtttacgctatatataatggaataagtgagataaacataaaatttgatgactgtttgaaactattcagccaaggctatatacataatatatcttatgatgaacgcaataaacaatacaaaggctatatattgtttttatatgacgatacaaacagaaaattaataaagatgaatcccaatgaggcagacaattatgtgaaagtttcaactctatgttataaaataaaagatggagtaaaaattaatagtttacggaatggagatattctgaagcaatttatagaaaaggatgaaaacgaaaaaattaattttttagaggaaaaagctgaaacgatctcacgtactcctgatttggatctaaaagtagacgcattaaaagtaggaaaatgcgtagcgtttatcaaaaaaggcgaaatcgctgataaaaaagttttcccatctaatagagatttttgtgttagatatagagatttggtgtggtctcaattaaatcctgatagattctattggctattcttagactacaacgaatttatgtacaaggtagatagaggttttataattaaaaacaatctattggaagctgtttccccagacataccaagaaaaacaataaacggttgggaaagtgagatatttttaaccaaagtagatgttatttctccaaaagatgaaggatacaaggacttagtaaatagtatgaacaaggtatatatatgtaaccaatattttgcccctgccaaacaaattgccaataacgtgccagtaaaaacctcttacacaataggggaattcggaaaactttgttggattgaagaagagaaaatagagaatatagtaagtaaatatttcgaaaaagccaataccgagtttaaatatagcatatacgatttaaatattatcgatagtgggaaagtttgcaaaataccttgtgaaaaaggcttaatagctatagaagctccagaagagatatgtaatgccttaaatggacaaatcgatattttgcctatagaagaaaagaatggcctattaatagtaaaacttattaaattcggttatcccaacatatatgtgtttcccgcatacattaataattgcgaaacaataaaaactcttcctaaagagggtaatgggatctacaaaaactatttgattataaacaaggaaaactggggtaatataaaagtaacagttaacgaatcaatagataatggattttgttgcattaaatgggataacattaaagaacagttactctttaacacttctaacgatccagctggttgcacaggtatttgggtagagcgtgattgtttagatttagtaaaatga

SEQ ID NO: 277 - protein, 569 aa, Nanoarcheum equitans
  signal (1)..(39)
MRALSNIIWLISAIVVALMSIAIISFSFFKTVNPLAALSKQAKEVGETATENFAPSIEEKPIEFTLSYKYDPFRRAPPYSKPILEKYTWKLSQTLLSSNSFEINFVDKDDHPKTKNIDISAGKLNIVYAIYNGISEINIKFDDCLKLFSQGYIHNISYDERNKQYKGYILFLYDDTNRKLIKMNPNEADNYVKVSTLCYKIKDGVKINSLRNGDILKQFIEKDENEKINFLEEKAETISRTPDLDLKVDALKVGKCVAFIKKGEIADKKVFPSNRDFCVRYRDLVWSQLNPDRFYWLFLDYNEFMYKVDRGFIIKNNLLEAVSPDIPRKTINGWESEIFLTKVDVISPKDEGYKDLVNSMNKVYICNQYFAPAKQIANNVPVKTSYTIGEFGKLCWIEEEKIENIVSKYFEKANTEFKYSIYDLNIIDSGKVCKIPCEKGLIAIEAPEEICNALNGQIDILPIEEKNGLLIVKLIKFGYPNIYVFPAYINNCETIKTLPKEGNGIYKNYLIINKENWGNIKVTVNESIDNGFCCIKWDNIKEQLLFNTSNDPAGCTGIWVERDCLDLVK

SEQ ID NO: 278 - DNA, 1110 bp, Nanoarcheum equitans
gtgcagttaagtatgaagcctataatagaatactatttgcaaaaatataacaaaacaatcaatataagcgatatagcaaaattggttaaacataactctaacatctccataaagaatataactattgagaataacatctctataggcataccaaaaagccctagtatagattttaatctatcctatttgtttgttttggcgattattatttttcttataaagtttagggggttgtttagccccaacccattgaaaaggttcatttatttgctaaaattgctaggcaaaaaatattatgaatcgaatagagaatttattagaaaatccatatttaagaaatatttagaaaagaaaaatagattattcgaaaaacatatattccttctatttttgtttggaggtttctcgaagacaattttaatagaaaaagaccaatttttatgtaatcctaattattctatcttaaattatatagataaggatttgcttaagcgatacccagaatattcaatgttttttgtttacaatgggtatatttttaatatggcttccgaagttgaaggtattccaatattaaagggctattttgggatatggaatttcagttctaaaaaatgtgaaaactataaagaaagaactttgatagcgtataaagacaataatataataattggagacaaagagtttttcatttataataaaaagttaaatatagactttaatgccttggatttggccaaatttctatataaccaattcaaaaacataaacattccaataaacataaatatttaccaatatataaagggattgtctataccaatagcttatttgttttatgtttttatgactatgtttttgctgtttaggatcaaaaatattaaaataagaaagccgaaagtagatattaatttttgggggttggagttatacaaattaactggagataaaaaatatttggaaagaaaaattaatgttttgttttatattatagagcgtataaaacttctttcaaataataataaacagctatcgttaaggcaatccctaacaaggttaaaattaggcctgcccaaaagtataaatcggtttttggtaaaaaggggctga

SEQ ID NO: 279 - protein, 369 aa, Nanoarcheum equitans
MQLSMKPIIEYYLQKYNKTINISDIAKLVKHNSNISIKNITIENNISIGIPKSPSIDFNLSYLFVLAIIIFLIKFRGLFSPNPLKRFIYLLKLLGKKYYESNREFIRKSIFKKYLEKKNRLFEKHIFLLFLFGGFSKTILIEKDQFLCNPNYSILNYIDKDLLKRYPEYSMFFVYNGYIFNMASEVEGIPILKGYFGIWNFSSKKCENYKERTLIAYKDNNIIIGDKEFFIYNKKLNIDFNALDLAKFLYNQFKNINIPININIYQYIKGLSIPIAYLFYVFMTMFLLFRIKNIKIRKPKVDINFWGLELYKLTGDKKYLERKINVLFYIIERIKLLSNNNKQLSLRQSLTRLKLGLPKSINRFLVKRG

SEQ ID NO: 280 - DNA, 714 bp, Nanoarcheum equitans
gtggcaattctggaaatgatagagctaataattggtcttatattattaactatcggtttaacccctttatttgcctatccaataatagataatgccccgaacaaagtaaaacaactaatcgaaaacaataggaaacaattctatatgccaatggtaatatcgttaatgcaataccaatatagttgtaggattaatcctaaatatacagaacctttgctaaagcaatatgttaaagaaaatctagaatacccatacgaagttagttgtaaagacttattagaaaaacccgaagtggttaaaaataatatattaacatttttagcaaacaaatggtatgctatattacaaaactcttatgattctatagcgaatagattaaagtctatattaaataaactgtttatccccttggttttagctataatatcgatagcagtatttataaaaagggccttagaagagaatagctatcaattatattttttggtctctattttaattcccatcgggatagctttgctaataaattatttctatatagagcctttaattaataatatactatctactttggtttataaccttatagggatcagcccctttttaccaaaaaccgatttatacttttgggcaggcctaattttaaccttgttagggattgccttaacgatagctgtttattattatttgaaagaagttttatacgctctataa

SEQ ID NO: 281 - protein, 237 aa, Nanoarcheum equitans
MAILEMIELIIGLILLTIGLTPLFAYPIIDNAPNKVKQLIENNRKQFYMPMVISLMQYQYSCRINPKYTEPLLKQYVKENLEYPYEVSCKDLLEKPEVVKNNILTFLANKWYAILQNSYDSIANRLKSILNKLFIPLVLAIISIAVFIKRALEENSYQLYFLVSILIPIGIALLINYFYIEPLINNILSTLVYNLIGISPFLPKTDLYFWAGLILTLLGIALTIAVYYYLKEVLYAL

SEQ ID NO: 282 - DNA, 879 bp, Nanoarcheum equitans
atgttcttcatatttaagatatttcgtttactatttgctttgccattaattatgttattagctataggtggttatttatatttccagcttaaatataaagagcacaaactaaaaaccctattggataatctaaacagtttgaaaagccaatatggtagtcttttaaaaaaatataaccaaactattggtttattagagactaaaaacgaaactataaaaaaattggaagaacaaaacaaaaaattagaatccgagaattattatttaaggttaaaattaaccaatctggaatcacagtattctaacaatgatagaattaaattcctaataaaagcgcaaaactataattttacagatttgccattagataaatgtaccaacaatgatacccttaactacgcttgcctagttaatataatgcaaaataaattgggtttctcttataaaaaagagagcggcgattatttagaaagtgttgacgaatttattagaactaaaggaggggattgtgaagattggagtttgtttgcttattccctaatatattatttagctagaaacggttataagaaaataactttttatgttaaacagaacaatagtaagctttatttatacaaagaaggtaatactatatattatttgcccaacgctaaagcttatacaatagaaataaaaaacccatcgatagtttgctataaaataaatgaaaccttgggccattgtattacagctatatgtgacaaaccattattgccaaaccaaaaaaacaattgtacttattttgagccccaaaacggaaaaatacttaatccaaaagagttatacataatagtgtcgaacgacttttactttagagagtggcaattctggaaatga

SEQ ID NO: 283 - protein, 292 aa, Nanoarcheum equitans
  signal (1)..(21)
MFFIFKIFRLLFALPLIMLLAIGGYLYFQLKYKEHKLKTLLDNLNSLKSQYGSLLKKYNQTIGLLETKNETIKKLEEQNKKLESENYYLRLKLTNLESQYSNNDRIKFLIKAQNYNFTDLPLDKCTNNDTLNYACLVNIMQNKLGFSYKKESGDYLESVDEFIRTKGGDCEDWSLFAYSLIYYLARNGYKKITFYVKQNNSKLYLYKEGNTIYYLPNAKAYTIEIKNPSIVCYKINETLGHCITAICDKPLLPNQKNNCTYFEPQNGKILNPKELYIIVSNDFYFREWQFWK

SEQ ID NO: 284 - DNA, 1623 bp, Nanoarcheum equitans
atgaccaaatccgtacaacccgtaataattttgcccgaaaactatgtaagaacagtaggaagagacgctttaagaacaaatatcatggctgcaagattagtagcggaaactgtaagaactactttaggtcctagagggatggataaaatgcttgtagacgaattaggagatataactgtaacaaacgacggtgtaacaatattagaacaaatggaagtagtacaccctgcagcgaaattaattgttgaagtagcaaaaacccaagaagaagaagtaggagacggtactactacagctgtagtaatcgctggtgaattgctaaagaacgctgaagaattattagacatgggtgtacatccaactgttatagctgaaggttacagaaaagctgcagatagggcattaaaagaattagacgaaatagcagaaaaaataacaaaagatgatgtagaggttctaaagaaaatagctaaaacagcaatgactggaaaagtagcagaattagcaagagacttcttagcagacttggtagttgatgctgttagaaaagtaacatacgaagttgatggtaaaacagtagtagatatagattctataaaaatagaaaagaaaattggtggaggtgtagaagatactgaattagttgatggtgtggtaatagacaaagaaagagtccatccaggaatgcctaaagtagtcaaaaatgcaaaaatagctttaatcaatggagcattagaagttaaagaaacagaaatagacgctaggataaatataacctctcccgaacaattggatgctttcttaagaaaagaagaagagatgctaaagagaatggtcgacaaaataaaagaagtgggcgctaatgtcgtattcgtacaaaaaggtatagatgatttagcagcatactatttagctaaatatggaatattcgcagtaagaagggttaagaaatccgatatggaaaaattagctaaagcaactggtgctaggatagtaacaaatgtagaagacctaaccccagaggatctaggagaagctgaattggtagaagaaagaaaagttgctggagagagcatggtatttgtaacaggttgcaagaatccaagggcagttactatattaattaggggtggtacagaacatatagttgatgaaatagaaagagcattaactgatgcaatgaaagatgtggcagttgcattaaaagatggtaaagtagttgctgggggtggagcagtagaagtagaactagcaaaaagactaagagaatgggcacaacaattaccatctaaagaacaattagcagcattgaagtttgctgattccttagaaataataccacaaaccttagcagaaaacgcaggtttagacccaatagaaataatggccgaactaagaagtaggcacgaaaaaggagaaaaatgggctggtgtagatgtattcgaaggcaaagtagcagatatgtgggaaaaaggtgttatagaaccattcagagtaaaatcccaagcaataaaatccgcaactgaggcagcaataatgatattaaggatagacgatgttatagccgcaaccaagaaagagggcgaatccaagaaagaaccagaattaccagaagaagaataa

SEQ ID NO: 285 - protein, 540 aa, Nanoarcheum equitans
MTKSVQPVIILPENYVRTVGRDALRTNIMAARLVAETVRTTLGPRGMDKMLVDELGDITVTNDGVTILEQMEVVHPAAKLIVEVAKTQEEEVGDGTTTAVVIAGELLKNAEELLDMGVHPTVIAEGYRKAADRALKELDEIAEKITKDDVEVLKKIAKTAMTGKVAELARDFLADLVVDAVRKVTYEVDGKTVVDIDSIKIEKKIGGGVEDTELVDGVVIDKERVHPGMPKVVKNAKIALINGALEVKETEIDARINITSPEQLDAFLRKEEEMLKRMVDKIKEVGANVVFVQKGIDDLAAYYLAKYGIFAVRRVKKSDMEKLAKATGARIVTNVEDLTPEDLGEAELVEERKVAGESMVFVTGCKNPRAVTILIRGGTEHIVDEIERALTDAMKDVAVALKDGKVVAGGGAVEVELAKRLREWAQQLPSKEQLAALKFADSLEIIPQTLAENAGLDPIEIMAELRSRHEKGEKWAGVDVFEGKVADMWEKGVIEPFRVKSQAIKSATEAAIMILRIDDVIAATKKEGESKKEPELPEEE

SEQ ID NO: 286 - DNA, 1704 bp, Nanoarcheum equitans
gtgaggagaaccttcagagaagctactattgctgagttctttgagaaaaataaacaattcttagggtttgatagtccaagaaaagctttagtaatgactgttaaagagctagtagataacgccctcgatgctacagaggaagcgagaatattgcctacaatcaaagttacattaaaagaaggcaaatatatgacagttagagtcgaagataacggacctggaataccttttaacgaagttccaaatgtttttggcaaattcctatatggtacaaaattccatgtgttgaaacaaaatagaggccaacaaggtattggtgctgcggcaataacattgtattcccaactaacaacgggtaaaccaattagggtatgggacaaaccaatagattcaaacaaagcttattattatgaaataatgattgatacaaaaaggaacgagcctgaagtattagtaaaaaaggaagtaaaactaaacataaaacatggactaattgttgaagcagacataaagggagaatacacaaaaggaaaacaaagcgtagaccaatatttaaaattaacagcagttgctaatccccatgcagaaataatatatagaactccaaaaggagaatacatagttttcaaaagaggcacaaatgaattgcctcccttgcctaaagaaataaaaccccatccccatggtatagaattgggacaactaaagaaaatggttagcgaacataaaggcgatctaatggatttcttaataaagaatttttcttctgtaggagaagacaaagcaaaagaaatactagctagatatatattctataaagaaggcaaagaggattttgaaaagttctttaaaagatttagagggagaaaaattgatataaaatcattaactagtgaagatttggaattattgctaaaagcaatgagagagaccaaattaaaaatgccttcagccaaagctttaataccgattggagaaaaaaatttgcaaattggtattactaaagagtatgatgtagaatatttggcagtaaaaactaggaaacctaaagtatattccgggggtataccatttttggttgaagtagctataggctatggagattttgaaaaagctgaaatattaaggtttgccaatagaaccccattattgtataaagcaggagaatgtgcaatagttaaagctataaaagatataaactggaaacgctatggttttgaggtagagaacaatttgccaaaaaatgctttgatattagtacatattgccagtgttaaagtcccatatactagtgaatcaaaagaggcaattgcagatataccagaggtaagggaagaaataaaaagagctttacaagaagtcgcaagaaaagttcagatatatattaaaaagaaagaggaaaccaaagaattggcagagaaatatttaagattttatgcctatggaaaagagatagaaagatatttgcctaagcttattgacaaagatgttgattcagtagtaactaaaaccatattaaagagattagaagaagagctattagaaaggataaagaacaacaaaaccattgtaacacatatagagaataaagactacgaaactgctaaaaagctaataaagaaaatggtgatgccattgattaagaaaaaaataattgatgaaagctttatagataggttaatccaactctacaatgtctcctaa

SEQ ID NO: 287 - protein, 567 aa, Nanoarcheum equitans
MRRTFREATIAEFFEKNKQFLGFDSPRKALVMTVKELVDNALDATEEARILPTIKVTLKEGKYMTVRVEDNGPGIPFNEVPNVFGKFLYGTKFHVLKQNRGQQGIGAAAITLYSQLTTGKPIRVWDKPIDSNKAYYYEIMIDTKRNEPEVLVKKEVKLNIKHGLIVEADIKGEYTKGKQSVDQYLKLTAVANPHAEIIYRTPKGEYIVFKRGTNELPPLPKEIKPHPHGIELGQLKKMVSEHKGDLMDFLIKNFSSVGEDKAKEILARYIFYKEGKEDFEKFFKRFRGRKIDIKSLTSEDLELLLKAMRETKLKMPSAKALIPIGEKNLQIGITKEYDVEYLAVKTRKPKVYSGGIPFLVEVAIGYGDFEKAEILRFANRTPLLYKAGECAIVKAIKDINWKRYGFEVENNLPKNALILVHIASVKVPYTSESKEAIADIPEVREEIKRALQEVARKVQIYIKKKEETKELAEKYLRFYAYGKEIERYLPKLIDKDVDSVVTKTILKRLEEELLERIKNNKTIVTHIENKDYETAKKLIKKMVMPLIKKKIIDESFIDRLIQLYNVS

SEQ ID NO: 288 - DNA, 447 bp, Nanoarcheum equitans
atgtattattgtgaaatttgtggagatcccattagagacaaactttacattatagaaatagaaggcaccaagctaaaagtttgcaaaagctgttctagctatggtaaaatcctagaaataatagatttgaaaaaaacaatatctaaagaggaacgcaaaccaattgttgaagaaataatagagtttgtgcccaattttaatgaactaataaagaaggctagagaagaaaagggtttaactcaatcagatttagcaaagctattacacacagatataaatacaataagtaaaatagagagcggggattattatcctagtgagaagctagctaaaaaaatagagaaactattgggcataaaaataatggaaaagaaaaaagtggctttatcccaagaaaaagcgaaagaagagctatacagtttaggagacattgtagagttggattaa

SEQ ID NO: 289 - protein, 148 aa, Nanoarcheum equitans
MYYCEICGDPIRDKLYIIEIEGTKLKVCKSCSSYGKILEIIDLKKTISKEERKPIVEEIIEFVPNFNELIKKAREEKGLTQSDLAKLLHTDINTISKIESGDYYPSEKLAKKIEKLLGIKIMEKKKVALSQEKAKEELYSLGDIVELD

SEQ ID NO: 290 - DNA, 807 bp, Nanoarcheum equitans
atggaagtacctttatacaatttacaagcctcgcaagtgggcaatatagaattgcccccacaatttaatgaaaaaataagatttgatgttataaaaagggctttcttagctatacaatcccataaaagacaaccttatggggcaagccctattgctggtaaacaacatagtgcatggacttctaagagaaggagaagctggagaactagctatggaagaggtatatcaagggtttccagggctatattaagaaggcatggcgcattattttattgggtagctagaaacatagcacaagctgtaaaaggtaaaaaagcccaccccccaaaggctgaaaaggattggtatgaaaaaataaacaaaaaagagagaagactagcaataaggtctgctttagccgcaactaaagaattagatttagtaaaagctaggggacacataatagataagcctgttccaatagttgtagatgggttagaacaattgagaaaaacaaaagagatacaacaattattattaaaattgggattagaaaaggaattagaaagggtatatgaaatcaaaaggagggctggtaaaggtaagagaagaggtagagcatatatagaaagaaaaggcccattaattgtggtaaatgactataacgaacaactattcaaagctgtagataacattccagggttagatatagaggaagtccctaatttgaatgtagaactactcgcccccggggcgaaaccaggaaggctattaattatttctaaagatgctttagaaactcttagagagaggaaacttttcttttaa

SEQ ID NO: 291 - protein, 268 aa, Nanoarcheum equitans
MEVPLYNLQASQVGNIELPPQFNEKIRFDVIKRAFLAIQSHKRQPYGASPIAGKQHSAWTSKRRRSWRTSYGRGISRVSRAILRRHGALFYWVARNIAQAVKGKKAHPPKAEKDWYEKINKKERRLAIRSALAATKELDLVKARGHIIDKPVPIVVDGLEQLRKTKEIQQLLLKLGLEKELERVYEIKRRAGKGKRRGRAYIERKGPLIVVNDYNEQLFKAVDNIPGLDIEEVPNLNVELLAPGAKPGRLLIISKDALETLRERKLFF

SEQ ID NO: 292 - DNA, 654 bp, Nanoarcheum equitans
atgccagaatatgttctaagggtaaacgatttgttattacaagatttgctttctaattaccaaatagatcattataaattaaaagatggaagaattgcaaaaccatatggtttatttatgattacttcagataacgaaaaagatatagtattgttgccaactcaagagattgtagactatatttcaataaaaactcccaataaggatccatatttagagcacataagggatatgcagtcaaaatatataggaaaaagcatagctaaatatttagcaaacattttgtttgattacctaggaataattggaacttattatataatagattctcacatgcccaaaacaaatttcggatacccattggataacattattagcgaagcattgtttgttgggtatgtcgcattgttagatagtttgttggagaaatatagagggaaagacattagtttcaaagagaaattcaaagaattgtttcctccatatttggtttggtctttaactatagggcctgccttagggatggtaacctctaaaataaaagatccaataatggagtatgcagccaatgtgagcaaactatatattttaaggcaatattttaaagcttatagaaagttaaaagaaaagtttcctctctctaagagtttctaa

SEQ ID NO: 293 - protein, 217 aa, Nanoarcheum equitans
MPEYVLRVNDLLLQDLLSNYQIDHYKLKDGRIAKPYGLFMITSDNEKDIVLLPTQEIVDYISIKTPNKDPYLEHIRDMQSKYIGKSIAKYLANILFDYLGIIGTYYIIDSHMPKTNFGYPLDNIISEALFVGYVALLDSLLEKYRGKDISFKEKFKELFPPYLVWSLTIGPALGMVTSKIKDPIMEYAANVSKLYILRQYFKAYRKLKEKFPLSKSF

SEQ ID NO: 294 - DNA, 381 bp, Nanoarcheum equitans
atgataatcaaaataaaaacccacaaaaggagagaaataattgatattactgatttagttagagaaaacataaaaataagagatggaatattgtttttgtttatccctcacactaccacagctattacaataaacgaatatgaacccaatttaatagaggatttttataatttgttcgaaaggataatgccaaccgattacccatataagcataatctaatagacaataatgcagatgcacatttgttagccagtttatttgggcattcgatttttatacctgtagagaataacgatttacaattaggaacatggcagagagtattattcttagaatttgatggcccaagggagagaaaaattataataaaacatctttaa

SEQ ID NO: 295 - protein, 126 aa, Nanoarcheum equitans
MIIKIKTHKRREIIDITDLVRENIKIRDGILFLFIPHTTTAITINEYEPNLIEDFYNLFERIMPTDYPYKHNLIDNNADAHLLASLFGHSIFIPVENNDLQLGTWQRVLFLEFDGPRERKIIIKHL

SEQ ID NO: 296 - DNA, 1335 bp, Nanoarcheum equitans
atgcatactgtgatagctataaggttaactaaaaacaatagaaatgctttttcttatctattaggcgcattagagaaacaaggctttgatataaatgaaatagcaatagcgagaagcttcgaagatctaatcaaaacaaaaccaaaaattgttttatattctttctatagcacagaggtttgggaagtaaaaaaagaaatccaaatgctaaaaagcaaaataaatgctatagccatcgctggaggttaccatgctagtgctatgcctagacatacattaaagatgggtttcgatatcgctgtagtaggagaaggagaagaaactttatattatttattggaaaatctaaaaaagaacaaagcaatcaataaggatttgttaactattagagggttagcttttaatttaaatggttacaaatttacaggttttgcaaaagtagaagatttttataaatatccaccattcgcagaatctataagaatggtaggccctatagagattagtaggggttgtccctttggttgcaattattgtcaaaccccattctttaagggatttagaatgagacatagacctatagaccaaatagtaaaacattcccgctatctaagagatatgcgttacatttctcctaacgcttttgcttatggatccccaggtgctatattggttttggaaaaactagaggctttgcttagggcgttacaacctctaagaaaagaaggaagaaggctatttttcggaacttttcctagtgaagtaagaccagaattcgttataccagaaactttagaattgttattaaaatatgctgacaatagaaaaataattattggggcgcaaagtggtgataatagaatactaaaactaatgcatagactacatgatgtggaaacaataaagagggctgtagaatattctatagaatatgggtttactccaatagtcgattttatcgtcggtactccttatgaagatgaagaaagcgatagaaatactatagaattgatgaaatggattatttctaaaggagggaaagtaagggctcattattttatgcccttacccggtacaccatgggctttatgtaagccaaagcctttatctaaagagatggttagatttttaggaactatggctcgccaatcaaaattagaaggagaatgggtaaaacaaatagaattgtctaataaattgcatagtttgataaaagagaattatgaagaggctacaggatactatgggccaatccccaatagatgtataaatgatgaacaaacaaataaaaatgataatcaaaataaaaacccacaaaaggagagaaataattga

SEQ ID NO: 297 - protein, 444 aa, Nanoarcheum equitans
MHTVIAIRLTKNNRNAFSYLLGALEKQGFDINEIAIARSFEDLIKTKPKIVLYSFYSTEVWEVKKEIQMLKSKINAIAIAGGYHASAMPRHTLKMGFDIAVVGEGEETLYYLLENLKKNKAINKDLLTIRGLAFNLNGYKFTGFAKVEDFYKYPPFAESIRMVGPIEISRGCPFGCNYCQTPFFKGFRMRHRPIDQIVKHSRYLRDMRYISPNAFAYGSPGAILVLEKLEALLRALQPLRKEGRRLFFGTFPSEVRPEFVIPETLELLLKYADNRKIIIGAQSGDNRILKLMHRLHDVETIKRAVEYSIEYGFTPIVDFIVGTPYEDEESDRNTIELMKWIISKGGKVRAHYFMPLPGTPWALCKPKPLSKEMVRFLGTMARQSKLEGEWVKQIELSNKLHSLIKENYEEATGYYGPIPNRCINDEQTNKNDNQNKNPQKERNN

SEQ ID NO: 298 - DNA, 294 bp, Nanoarcheum equitans
atggatttagaagagattagaaaaaagaaattggaagaattaaaaaaggaagaagcaaagagaaaattgttagagcaattagaatcgaatgttatgcagtatctaacttcggaagcaaaacaaaggttatataatataaaaatggcccaccctgaaaaatatgaattggcattacaaatattatatagggtaatacagcaaaccccaacaattattgatgatacaacattaaaaaagctattggctaagctattccaaaaaagggagccaaagataagatttataaggaagtaa

SEQ ID NO: 299 - protein, 97 aa, Nanoarcheum equitans
MDLEEIRKKKLEELKKEEAKRKLLEQLESNVMQYLTSEAKQRLYNIKMAHPEKYELALQILYRVIQQTPTIIDDTTLKKLLAKLFQKREPKIRFIRK

SEQ ID NO: 300 - DNA, 543 bp, Nanoarcheum equitans
atgaaggttgtactagtaacaggtttaccaggagtgggaaaaacaacaataataaaggaagcaatgaaaagaattaatttcacttacataaatgccggcgatattgtttcttcttttttaaaaatggatagggacaaaattttagatttatacatcaaaagtccttccctttatagaaaaatgcaagatatcttaaaaaaagcgattaaaaaaagagctaaagggttaactattgttgatacacatttattattttacaaaaacaatatattgattcctggtgttactagagattttgttaacaatttaaatgttagagctgtaacatacatatatgcgcctccaaaactaatattagaaagaagaaaaaaagacaaaagaaaaaggcctgaaataaatataaacgatttggagaaatggttaaccctttctatgaatatgttaattcctattttgtttgaagaaaaaatagtaaaaataatagaaaacatagaattagaaaaagcggtaaacgaatttattgaatttgttacttccttataa

SEQ ID NO: 301 - protein, 180 aa, Nanoarcheum equitans
MKVVLVTGLPGVGKTTIIKEAMKRINFTYINAGDIVSSFLKMDRDKILDLYIKSPSLYRKMQDILKKAIKKRAKGLTIVDTHLLFYKNNILIPGVTRDFVNNLNVRAVTYIYAPPKLILERRKKDKRKRPEININDLEKWLTLSMNMLIPILFEEKIVKIIENIELEKAVNEFIEFVTSL

SEQ ID NO: 302 - DNA, 303 bp, Nanoarcheum equitans
ttggtgaatggattggattatcaaactatagcagttttatttggggtgttgctagctttattacattatttaattaaaaaaataactgttggggaaaatttgcctatgagcgagtttatttctacattttctgtaggtactacttttatgatgggtatattttttattttgtatggagtattccaatgggaatggttaaaaccattgtctagcgataggtctgcattcgtaatagcaggagtagcatcgatgtatctaacaggttcacaaataaaaaagatttttagcgaattattccaatga

SEQ ID NO: 303 - protein, 100 aa, Nanoarcheum equitans
MVNGLDYQTIAVLFGVLLALLHYLIKKITVGENLPMSEFISTFSVGTTFMMGIFFILYGVFQWEWLKPLSSDRSAFVIAGVASMYLTGSQIKKIFSELFQ

SEQ ID NO: 304 - DNA, 1179 bp, Nanoarcheum equitans
atgtattttaaaccaaattttgagcaatttttaccaaaaaaagaagattatgaaaaagctaaaaaagctttagactacataattcccattttagagaaaactccccatatttatgatgtttttgtagggggttcctacgcaaaaggcacttggttgggcagagacatcgatatatttgttaggtttcctaaaaaatacaaagggcaaaacataagtatatacatagagcaaactttgaaagaacataatgttccttatataaaactacatggaagtagggactatttccaaaccttttatgagggattaaaaatcgaaatagttccaatattaaaattggatagccccttagaaagggaattcgttacagatatttcgcaattccatgtggaatgggtaaaaaagaacataaaaggtttagaaaatgatgcaaaatatttcaaaatttttaacaaactaattaacacttatggggccgaatcctatttaggtggtttatctggatatgcttgcgagattttaactatacattacaaagggtttactaatttgttaaaaggtattctaaaatggaaacccaaggtttttatcgatatagaaaagcattattctaatataaaagaagcaataaatgaattgggtaaagacaaaacagcttctccattaatattaatagacccagtagataaaacaaggaatgttgcggcttctttaagctataaaaacttcgctttgataatagcgaattcttatttgtatttaaataataacattttgtacaaaatcaataaatccgattttgaaaccatgttagaaataacctttagagtagaagaaactaaagaagacataaaaaatgctaaaatttcaagattaactagaaaaatcgttaattatttagaaaaaaatggtattgaagtttatgcctatactatagattttgacaaaaacaaatcctatttgtgggtttgttgtgagaaaataacaataaaaacaaaacatttgggacctccggcgtgggttaatttggacaagttcctagaaaaacacaataaattctttattagggaagacggtaggttatataccataataaacaaaacctttagtgtatatgacataaaaaaagtatacccggaaatagagtctataaaatttttaaataataacccaacctaa

SEQ ID NO: 305 - protein, 392 aa, Nanoarcheum equitans
MYFKPNFEQFLPKKEDYEKAKKALDYIIPILEKTPHIYDVFVGGSYAKGTWLGRDIDIFVRFPKKYKGQNISIYIEQTLKEHNVPYIKLHGSRDYFQTFYEGLKIEIVPILKLDSPLEREFVTDISQFHVEWVKKNIKGLENDAKYFKIFNKLINTYGAESYLGGLSGYACEILTIHYKGFTNLLKGILKWKPKVFIDIEKHYSNIKEAINELGKDKTASPLILIDPVDKTRNVAASLSYKNFALIIANSYLYLNNNILYKINKSDFETMLEITFRVEETKEDIKNAKISRLTRKIVNYLEKNGIEVYAYTIDFDKNKSYLWVCCEKITIKTKHLGPPAWVNLDKFLEKHNKFFIREDGRLYTIINKTFSVYDIKKVYPEIESIKFLNNNPT

SEQ ID NO: 306 - DNA, 282 bp, Nanoarcheum equitans
atgcaaaacgttaccttagatatggtatacaaatcaatccaagaagtgaaccaaaatttattagctttgttaccgcatttgcagttaatcccttacatatatgttagcgcagcaatctctgttggcatgtttattggattagtagttgtaataaagaaaatgctattgttagaggaaagattattaagcattgagctaaaagtagaacaaaatactgaaaaaatagagaaactagaagaaaagatactaaaattgttagaaaagaaagaaaaaacagaataa

SEQ ID NO: 307 - protein, 93 aa, Nanoarcheum equitans
MQNVTLDMVYKSIQEVNQNLLALLPHLQLIPYIYVSAAISVGMFIGLVVVIKKMLLLEERLLSIELKVEQNTEKIEKLEEKILKLLEKKEKTE

SEQ ID NO: 308 - DNA, 381 bp, Nanoarcheum equitans
atgattgcaattaattatatgaacctcgaaatgagagatgtggttttgggtttggtatttgtaatagcaatggcagtagcagcagtaataggggcaccatcattagcattagcgacatctttctatttattttacctattatccaaatatgttgtaaacgaagagattggagcattatatttggttaactctttcttagagttgttaaagctattattagcaggagtattattgtcttttggagttgctaagggctttgcaggagtagcagcatatacaaaatacatagatttgttagaattgttaatcgttatagtagcagtagtagcaactctatgctctgtattcaaaaaattctataaatccgtaaaagctcactaa

SEQ ID NO: 309 - protein, 126 aa, Nanoarcheum equitans
  signal (1)..(38)
MIAINYMNLEMRDVVLGLVFVIAMAVAAVIGAPSLALATSFYLFYLLSKYVVNEEIGALYLVNSFLELLKLLLAGVLLSFGVAKGFAGVAAYTKYIDLLELLIVIVAVVATLCSVFKKFYKSVKAH

SEQ ID NO: 310 - DNA, 2886 bp, Nanoarcheum equitans
atggcccagactaagactaaaacacaaattcgattaaaaatgctagaaaaaattgaaaaatacaaagaacctgtatttttaattctgttatttctatctggatttctatttaaagcggtaacaataggttctctttatcccgaagaattgctcggcccagatccttatagggcttatagatatttccttagtgtattacatggtataaatatattcccagattgtttagcctatgttcctttctgtagtactccaccacatcctgttcattttctatatccaatagtattatattttctaaaacccttaactatgcttttatcgctaatagcaaactttttcggtctaaatacttctatatacaattacgaaaatttggttgtattattagctaatccattctttttcggtttgtctgttatcttatactattatatatctaaagaattggttggaactgggctaccagctttgctatttgcggtatttcctgctaatggttatagattattagcaggaagattcgaaaaggaaccaattgcttcttttctttatattttaattttattcctttattataggctaataaaagaaacaaatccaaaatacaaaattttatattccattagtttattagtatcgattgtttctctttatttagcatggggtggctctgctgtatttatattcgctctagaaataatggagttattaagatggatacacaataagccaataaaagaatttgttataccgggtttaagcatattctttgttatggctatcgcttacgctttaaatataaccccttgggttttgcatacatcccaatatgctagtggtatattattattcacattaggattagctgaatttttagaaactaggctaaaaataaaagacaaaacccacaaactaatgttatatacaatattatcgttgttatttttgatgcccctattcccatctataattgaaagactaaaaatgtctaatatttattcaggtaatagatttatgtccacagtagctgaggcaagacccactcaatttatagattggtatgattcattagaatgggttggtatagcttttaccgtaatatctgcattcttggctggagaaacattaacggaaagtattttattagcgttctatgtactagcctctttctatgtaattggttttaaacctagtttattattttatttagttataattttgtataatatattttacactaagcccaacttatctaaaatatttgtattaagcaatatgtttttcttagctatagggcaaatagcagttagaaccatattttacagtgcttttgctgtcccaattcttgttggttacgcttttaaaaaattggaaaacttgaacataaacaagaaatatataaaatatgtatcgatagctttgtccatactaataattctagtgtattacaaacatataaacccaataactgctataccagtaggtacaacaatattagctatgttcttattcccatctattagttctatattgtttgcttctttattatttgttactggttattttgtaaaaccagtattcgctttaggcgaaatagattggatagggttaaaacaaatatttaacaaaatggaaaaagatgctttaataacgcattggtgggattatggatatataactcaatattttgctaatatattgggcaaaacaaatagagttacttttttagatgggggtaattattatccctattggaaccatctatttggtaggtatgttttaggcacatacaatgaaacagaggcattagaattattatatgcacatgccaactttaatagcacaataaaagagaaactaaaagagtggttcggagtaaatgttaaatacaattataatgggacgagacctacatatttattaatacattataccgatataggtaaaagccaagctttccttaaattaggaagtaacgaaaactacgatatatttactatagtgacaagggcgaaagcaaaagtaataaacaataatactatagaatatatattagatttcccgaacgatgatgaaaactatggtgaaaaatgcataccagatgttaatggcaattattgttcacatgttctaaaaataaaactagaatttgacaaaccaataataaatggaactgcaacccaatattattatatagcgcacactttgtataaaacagaaataggctatgcaaacccttgggttaaatttgggaaaaaactagtagtattgacttcaaatgatttgaaatatgctattccagttaatggcacaatatacatgtatgacataatacctaccccgtatggaattaaagcaataaatgaaagggcttatccattaagatgcgtttatatctttgataaaaagataatactaaacaaaaatggctatggttgtttgtatttagctccaactatagatttggaaaatacattattgtttggcaaagcaatggaatttaaaaagccttcttatgcaaactggtatttctatggattctttatgaataaagcagaaaatatgctatgggttaagctttatttctttgacaattctaaatactttaaattttacgatggctatagagcaataggcagaaacataaggaatatatatagtttgttaaccctctataataaacatgccataacatgggaaatacaaccaataaaaatttacaaaacaatttatccgaacaatttctctattcctgaatggaaaagatgtatatatttagctagagacgcaaaagaaatactaagatgtattgatctatataaaatacaactaccaaaagaaaagatagaacttctaaaacaaggcaacttttatgttatttaa

SEQ ID NO: 311 - protein, 961 aa, Nanoarcheum equitans
  signal (1)..(38)
MAQTKTKTQIRLKMLEKIEKYKEPVFLILLFLSGFLFKAVTIGSLYPEELLGPDPYRAYRYFLSVLHGINIFPDCLAYVPFCSTPPHPVHFLYPIVLYFLKPLTMLLSLIANFFGLNTSIYNYENLVVLLANPFFFGLSVILYYYISKELVGTGLPALLFAVFPANGYRLLAGRFEKEPIASFLYILILFLYYRLIKETNPKYKILYSISLLVSIVSLYLAWGGSAVFIFALEIMELLRWIHNKPIKEFVIPGLSIFFVMAIAYALNITPWVLHTSQYASGILLFTLGLAEFLETRLKIKDKTHKLMLYTILSLLFLMPLFPSIIERLKMSNIYSGNRFMSTVAEARPTQFIDWYDSLEWVGIAFTVISAFLAGETLTESILLAFYVLASFYVIGFKPSLLFYLVIILYNIFYTKPNLSKIFVLSNMFFLAIGQIAVRTIFYSAFAVPILVGYAFKKLENLNINKKYIKYVSIALSILIILVYYKHINPITAIPVGTTILAMFLFPSISSILFASLLFVTGYFVKPVFALGEIDWIGLKQIFNKMEKDALITHWWDYGYITQYFANILGKTNRVTFLDGGNYYPYWNHLFGRYVLGTYNETEALELLYAHANFNSTIKEKLKEWFGVNVKYNYNGTRPTYLLIHYTDIGKSQAFLKLGSNENYDIFTIVTRAKAKVINNNTIEYILDFPNDDENYGEKCIPDVNGNYCSHVLKIKLEFDKPIINGTATQYYYIAHTLYKTEIGYANPWVKFGKKLVVLTSNDLKYAIPVNGTIYMYDIIPTPYGIKAINERAYPLRCVYIFDKKIILNKNGYGCLYLAPTIDLENTLLFGKAMEFKKPSYANWYFYGFFMNKAENMLWVKLYFFDNSKYFKFYDGYRAIGRNIRNIYSLLTLYNKHAITWEIQPIKIYKTIYPNNFSIPEWKRCIYLARDAKEILRCIDLYKIQLPKEKIELLKQGNFYVI

SEQ ID NO: 312 - DNA, 1812 bp, Nanoarcheum equitans
gtggttggcgatatatatttgaatggcaaatatataggcaaaaccgataaccctgaaaagttcgttcaagaatttaggaaaaaaagacgtttaggttatttgcccgaaacagttaatatttatctggatgaacaaaatgatatttatatttatacagatggaggtagaatagttagacctttaattgttgtagagaatgggaaaccaaaattaactcaaaagcatatagagttattagcacaaggcaaactaaaatgggatgatttagttaaacaaggtattatagaatatttagatgctgctgaagaagaaaacgcatatatagcattagatatagaggatttaactccagaacatacacatttagaaataggtcctcaagtaattttaggaatattatccgctgcagttccatatgcgaggtttaaccaatctgctaggctaaatagaggagaaagaactcaaagacaggccctaggtttatatagtgtggcttacccattaagattcgaatccgatgtgcatgtagcacaaacattacaaaaacctttggttagaacaatagtgcatgatttaattaggtttgatgaaagacccgcaggctataatatggttgttgcagtaatggcttacgaaggttacaacacacaggatgctttagtaattaatagaaatgctatagactttggttttactagaacaatgtactttagaccttatgaagcagtagaaaggaaatatgctttaggattaagtgatgaaataactgtgccaagtcccgatgttagaggctacaagggagaaaaacattatagacatttagaaagtgatggtattgtatacccagaagcagaagttaaaggaaaagatgtattaattggtagaatttccccaccaaggtttttagaagggggagaactagcattgcttggagctgcaacattgcaaaaaagagattcctctataacagttagaagcgaagaagagggtattgttgatagtgtattagttactgaaggagaagacagcaatctaaaagtaagagttagaataagaatggaaagacctacagagattggagataagttttcatctagacatggtcaaaaaggtgttatagggttaattgtacctccatcagatatgccatttactgcgagtggtatagtgccagacctaatatttaacccccatggtttgcctagtaggatgacaatagggcaaataatagaattggtagcaggaaaagttgcttctttaagagggaaagctgttgatggtaccccatgggaagaagagcctgtagaagatttaagaaaacaattattaagattaggttttagagaggatggcacagaaacaatgtatgacccaataactggggaggaatacaaagtaaaaatatttgtaggagtgatgtggtatcataaattgaaattcttagcagcaaacaaattgcatgcaagggctagagggcccatggctatacttacaaggcaacctacagaaggtaaatccagagaaggtggtttaagatttggagaaatggaaactgatgtaattttatctcatggtgcagcaattagtttatatgaaagatttggttctgatttagtaaaagtcccagtatgtgaaaaatgtggggctatagcaatagaaaacaaagaaaaaggcactgcttattgcccagtttgtggagaaacagagaaaataagttatgtagaaatgagctatgcatttaaactatttttagatgagttaacttccctaggaatatggcccagactaagactaaaacacaaattcgattaa

SEQ ID NO: 313 - protein, 603 aa, Nanoarcheum equitans
MVGDIYLNGKYIGKTDNPEKFVQEFRKKRRLGYLPETVNIYLDEQNDIYIYTDGGRIVRPLIVVENGKPKLTQKHIELLAQGKLKWDDLVKQGIIEYLDAAEEENAYIALDIEDLTPEHTHLEIGPQVILGILSAAVPYARFNQSARLNRGERTQRQALGLYSVAYPLRFESDVHVAQTLQKPLVRTIVHDLIRFDERPAGYNMVVAVMAYEGYNTQDALVINRNAIDFGFTRTMYFRPYEAVERKYALGLSDEITVPSPDVRGYKGEKHYRHLESDGIVYPEAEVKGKDVLIGRISPPRFLEGGELALLGAATLQKRDSSITVRSEEEGIVDSVLVTEGEDSNLKVRVRIRMERPTEIGDKFSSRHGQKGVIGLIVPPSDMPFTASGIVPDLIFNPHGLPSRMTIGQIIELVAGKVASLRGKAVDGTPWEEEPVEDLRKQLLRLGFREDGTETMYDPITGEEYKVKIFVGVMWYHKLKFLAANKLHARARGPMAILTRQPTEGKSREGGLRFGEMETDVILSHGAAISLYERFGSDLVKVPVCEKCGAIAIENKEKGTAYCPVCGETEKISYVEMSYAFKLFLDELTSLGIWPRLRLKHKFD

SEQ ID NO: 314 - DNA, 960 bp, Nanoarcheum equitans
gtggatgcgtctaaactattagataaagcattcgaaaaagcaagaattgtttctcaagcggtatatagacaatcaaagaaaaaaggattagctaaaataaaggaaaccgaaatcaatagaataaaagtagtaagagattatttagtatctaaattaaataaaatagttgagagctttcctagaataaaggatatgccaatattttatgttgagctattagatacttatataggaattaaaaaatataaaggaactttagcaaaattcaaatacagtgcagattttattgataagctattccaacaatacaaaaataaaattaaaggcgcatctaatatagagcaaataagaaatgcaagaaaatccttctatgggagagtatcttctataataaaagagttgccatttgacgagctaagagaaatagaaaaaaacttaaaagagttcccttatattgggaattctatatacaatgtggtaattagtgggttgccgaatgtgggtaaatccactttgttaaatatattaacaaacaataaagtaaaaactgcgaattacccatttacaacaaaacaaattttgattggtaaaatcaaaacccctttcggagatatagcagtaatagacacccctggaatattggataggccattagataaaataaataaaatagaaaaaagagcagtcctagctttaaggtatttagccgacgatataatatatattatagacctaaccgaaactagcgccccattaaagaaccaactaaacttattagaacaaattaaaaaagagtttggcaatccaataatctatttctctaaaaccgatctatttacagacaaagaatgggctttgtataagaaattaaatataaagggttttactaacccaaaagagcttaaagagtatctaatgaataaggctatagaagtgatgaagaaaaaggctgaacaatga

SEQ ID NO: 315 - protein, 319 aa, Nanoarcheum equitans
MDASKLLDKAFEKARIVSQAVYRQSKKKGLAKIKETEINRIKVVRDYLVSKLNKIVESFPRIKDMPIFYVELLDTYIGIKKYKGTLAKFKYSADFIDKLFQQYKNKIKGASNIEQIRNARKSFYGRVSSIIKELPFDELREIEKNLKEFPYIGNSIYNVVISGLPNVGKSTLLNILTNNKVKTANYPFTTKQILIGKIKTPFGDIAVIDTPGILDRPLDKINKIEKRAVLALRYLADDIIYIIDLTETSAPLKNQLNLLEQIKKEFGNPIIYFSKTDLFTDKEWALYKKLNIKGFTNPKELKEYLMNKAIEVMKKKAEQ

SEQ ID NO: 316 - DNA, 582 bp, Nanoarcheum equitans
gtgaaaaacctagaatttaaaggagaatataaagatctaataattagtggtaaaaaggttgctacaattaggattggtaagctaccaataaaaaagggacaaaaattatatatacattctgggggctatgttattggagaagcgatagtaaaagatgttaaaataataaggctaaaagatatagataacgatatggcaaaaaaagacggatttgaatcgaaagaagagttaatagctaaacttaaagagcattatccttttttaaaaaaggacgagccattaacttatatagagttcgagtttaaaccatatgaaaatcctatccctagtgaagactttgcttggcaaggtttcgaaaaaaacccaatagagattgctaaaatcggaatagaaaagaaagatgaattattgttatcaaacaaagaagttgaattgcttaaaattctaatcgaagagggctctataagaaaagcagcattaaggttaggaaatctaaagaagagagagatatttagaaggatattaagaaaaataatgcgacgccttcaatctatggagtcaactaaggatttaagtgagtga

SEQ ID NO: 317 - protein, 193 aa, Nanoarcheum equitans
MKNLEFKGEYKDLIISGKKVATIRIGKLPIKKGQKLYIHSGGYVIGEAIVKDVKIIRLKDIDNDMAKKDGFESKEELIAKLKEHYPFLKKDEPLTYIEFEFKPYENPIPSEDFAWQGFEKNPIEIAKIGIEKKDELLLSNKEVELLKILIEEGSIRKAALRLGNLKKREIFRRILRKIMRRLQSMESTKDLSE

SEQ ID NO: 318 - DNA, 540 bp, Nanoarcheum equitans
atggagaaaaaagttttaatagcgatccctttactactatccgttggtttcatattttattatttttcgcctccctcaaataatatggggtttgccaaaatatatatagatagtgaattcatgcctaaaaaatatacttgtgatggcgaaaacattaatccaagaatagagtttaacgagccaggtatttatgctataataatgcatgaccccgatgctcccgcgggcgattggttccattggggaataatattttggggcaaagagatactagaggggttaccaaaaacacacaaaggtgaaaactttatacaaacctacaatgatttctactattataattatattactggcaatattaaaggaattggctacgatggaccttgccctccaaaagggaaaccccatagatatgtattcgaagtatataaattggacagcaaaccggataaagacataatagaaaaaaccgatataataaagtttgtcaaagagcacgcattagaaaagcaagaatttgtttatttatatggaagatga

SEQ ID NO: 319 - protein, 179 aa, Nanoarcheum equitans
  signal (1)..(28)
MEKKVLIAIPLLLSVGFIFYYFSPPSNNMGFAKIYIDSEFMPKKYTCDGENINPRIEFNEPGIYAIIMHDPDAPAGDWFHWGIIFWGKEILEGLPKTHKGENFIQTYNDFYYYNYITGNIKGIGYDGPCPPKGKPHRYVFEVYKLDSKPDKDIIEKTDIIKFVKEHALEKQEFVYLYGR

SEQ ID NO: 320 - DNA, 972 bp, Nanoarcheum equitans
atgttagtaagaattgctgaggaaattcttgaaaacactttaattagagttgaagataaaattagaactgggacttttcccacttttttaactatccaagttttcgtttatttgttttttatatcttttatattaacgattgcagcttttgtaataatgtattatttggttaactttttaataccaaatgtaaatgctagcttaataactttgttatcattggttgttattgtgcctatattaactatagtgactgcccgattaattgtttggctattagaagggtttagagttgataatttatctcaatcactaagaaaaagtttttttgttttgttttctttattgggtttattccttgggcctttcatttctagtggttatatactaacgctattccaaaattctactcctgttttagcccaaacgagttttgttttgccagcaatagcccaatattttagtatatcaattcctatgtttttgaaagtgctaacccataatttaagtgtagcaggagttttattattattagccatatttttgggagaagacgcatttttcatactattatataatgctgtagcgttagcaacattaattacagatttattaccgaaaacagatctagcccatgcaatagcgaattggttgttattcacaataatgtccctcccccatatgataccagaatttttagggtttttggctttctatttattaggagtctacattagttttagatattgggaaccattaaaagaatggctaaaagagaatggtttattattaagatccgaagtgtataaagaattagaagaagaaatagatataatagaaagatggcaaaagaaaatgagtgggtattatgttttaatgatgttcatactaggagtaatattaataatagttggagcaattattgaagtctttgtaacagccccaataattagggccatactaaaaatatga

SEQ ID NO: 321 - protein, 323 aa, Nanoarcheum equitans
MLVRIAEEILENTLIRVEDKIRTGTFPTFLTIQVFVYLFFISFILTIAAFVIMYYLVNFLIPNVNASLITLLSLVVIVPILTIVTARLIVWLLEGFRVDNLSQSLRKSFFVLFSLLGLFLGPFISSGYILTLFQNSTPVLAQTSFVLPAIAQYFSISIPMFLKVLTHNLSVAGVLLLLAIFLGEDAFFILLYNAVALATLITDLLPKTDLAHAIANWLLFTIMSLPHMIPEFLGFLAFYLLGVYISFRYWEPLKEWLKENGLLLRSEVYKELEEEIDIIERWQKKMSGYYVLMMFILGVILIIVGAIIEVFVTAPIIRAILKI

SEQ ID NO: 322 - DNA, 984 bp, Nanoarcheum equitans
atgaaacctatcttaattttattagctgtagtattaattatagtattttttattttgttgccttttattccttacatagctactggggcagtaatagcctattttctatggcccttatataaaaggctatccaaatttgtcccaaaaagaattgcggcccttggtttaataattgttttgggcttaataattggagctacaacttattactcctctttagttttgtatgttgagttgtctaaatatttacccaccataataaaacaatatagctctaaccaaatggttggaaaatatttaccaatcgttttacaaaaactttatccaaccatattagattatgctacttctctgataaagctattgccagacatgtttttaggcatatttatagcgatgctaagcgcttactatttcttattggatggacaaaaagcaatagattatataatcaattggattgctgaaagtaaagaggatagaaaccaaataattaatacaaccaaatcttatctagatgcagtaataattggtactatatttggggctctagcccaagcggttgtgtcctatattggtttcttaatattaaacataaaacttgctttagttttatctatattggtttttatagtagcgatattgcctattgtaggtccatcaatgatatgggttttgttagccctatattattttatgcagaataacattagttttacaatattttctttagtatatggcttattcgttgtgggattgatagataatattgtaagaatgttcacagtttcgtctaaagcagatatacatcctttgttagcggcattatccatgattggggggtctatactaatgggatttgccggcctatttttgggcccagtattagttggtttagccttatctcttattgattatataaaaaacaaaagaatttattcttcttcaatttcttcgagctcctcaaattcttcgtcaatgtaa

SEQ ID NO: 323 - protein, 327 aa, Nanoarcheum equitans
  signal (1)..(33)
MKPILILLAVVLIIVFFILLPFIPYIATGAVIAYFLWPLYKRLSKFVPKRIAALGLIIVLGLIIGATTYYSSLVLYVELSKYLPTIIKQYSSNQMVGKYLPIVLQKLYPTILDYATSLIKLLPDMFLGIFIAMLSAYYFLLDGQKAIDYIINWIAESKEDRNQIINTTKSYLDAVIIGTIFGALAQAVVSYIGFLILNIKLALVLSILVFIVAILPIVGPSMIWVLLALYYFMQNNISFTIFSLVYGLFVVGLIDNIVRMFTVSSKADIHPLLAALSMIGGSILMGFAGLFLGPVLVGLALSLIDYIKNKRIYSSSISSSSSNSSSM

SEQ ID NO: 324 - DNA, 168 bp, Nanoarcheum equitans
atggacatcttagataaaaagaaattacccgaagaggaagaagaagaggagtacgatgaggaatatgaagaatatatggaagatctatatgaagaagtagaagaggaagaagatgattattacattgacgaagaatttgaggagctcgaagaaattgaagaagaataa

SEQ ID NO: 325 - protein, 55 aa, Nanoarcheum equitans
MDILDKKKLPEEEEEEEYDEEYEEYMEDLYEEVEEEEDDYYIDEEFEELEEIEEE

SEQ ID NO: 326 - DNA, 306 bp, Nanoarcheum equitans
atgcggtataacttattggcagtttttggcatagcaattttatttattatacaaaatttgcaaaagcccataaattttagagatataaaagagtatatgggagaaagggtaaaatttatgggcgaaataaaatacaaacaatgtattaacgattggtgttactatcgaatttgctatgacaaatgcatagaaatgaaaggcataaagattaattgtgtaaaaattgagggatttggctttgttaagctaaaaaatggcaaacccattctatatgtttataataaaaaagatattcgttgtatttaa

SEQ ID NO: 327 - protein, 101 aa, Nanoarcheum equitans
MRYNLLAVFGIAILFIIQNLQKPINFRDIKEYMGERVKFMGEIKYKQCINDWCYYRICYDKCIEMKGIKINCVKIEGFGFVKLKNGKPILYVYNKKDIRCI

SEQ ID NO: 328 - DNA, 876 bp, Nanoarcheum equitans
atggactataatatatttattaacatagttttatcctctttcgttgttgctttggccagttctttagtaacagtatcgataaaatcgttcctaaaaaaagtaaacatgttagagcatttatcgggtttcgttttagcctctttgataatgtctatcccagagttgttattaatcgtattcggcaacaacatttttaattataaaactccattatacataattactacttctgcattgtttggagtagtattctctatgttaatctattatataaaagggaaaaaagaagtttcccttaaacatatagaaggctatttagatttaatagtttttgctttgtttttgccattcttagcagtagttgatggaataataacagaattagatggtttattattagtattagcttactttttaatattgttagcaactttatatgaaagtaggggtaagaagattgatttttccactttttacaatgagatatcacccattctattagggatggtaactatgtctttggttataaacattgttctatactatgttattagaactaatttatccccgaatttggttggtcttttattaggtttagtatcggtagttccccaattagtttctgctttggtatcggataaacatactttagaagaaagcgttggtagcacaataactctattaactttggctttaggtattattcctttgctatacggagaaataaaactaaaacctactgagctttctttgatatatttgtctataataacatcctatatgctattagtagcagggaaactaggcaaaatagataaagaagagataattataatgttgatagcgttgtttacctatttggtgcatgcggtataa

SEQ ID NO: 329 - protein, 291 aa, Nanoarcheum equitans
  signal (1)..(25)
MDYNIFINIVLSSFVVALASSLVTVSIKSFLKKVNMLEHLSGFVLASLIMSIPELLLIVFGNNIFNYKTPLYIITTSALFGVVFSMLIYYIKGKKEVSLKHIEGYLDLIVFALFLPFLAVVDGIITELDGLLLVLAYFLILLATLYESRGKKIDFSTFYNEISPILLGMVTMSLVINIVLYYVIRTNLSPNLVGLLLGLVSVVPQLVSALVSDKHTLEESVGSTITLLTLALGIIPLLYGEIKLKPTELSLIYLSIITSYMLLVAGKLGKIDKEEIIIMLIALFTYLVHAV

SEQ ID NO: 330 - DNA, 627 bp, Nanoarcheum equitans
atgatgaagaaagagaaaccatcattagaatcgagaaagctatccaagaaagaactagcgataatattatctaaactacttcctataaaaaatcctaaatatgaattggagcaataccaaaccccttctgaaatagctgcagatatagcgtgggctatacctattggagatgaaatagcagatttgggttctggcaatggcatattaggattagctttagccctagtgggttggaataaagtatatttaatagaaaaagatcctgagcaagaagaaatattatataaaaacaaggaacttttgggtttaaataatgtagaaatattaataaaagatgtgggcgatttggaattaaatatagaaaatgtgattgctaacccaccatttgggcacaatagcaatgaatatagaaagttttttcattttatagaaaaaaacaagcccaaaactgtatatttattatgggaggaatcgcaatataaaaaactaaaaaagttaaaggattacgatattaaaataataaaaaggtaccaatttccaataaagcccatatattttttccacacaaagaaaaaacattatattaatgtgttatttcttaaaggggatcttagagagcaaatttga

SEQ ID NO: 331 - protein, 208 aa, Nanoarcheum equitans
MMKKEKPSLESRKLSKKELAIILSKLLPIKNPKYELEQYQTPSEIAADIAWAIPIGDEIADLGSGNGILGLALALVGWNKVYLIEKDPEQEEILYKNKELLGLNNVEILIKDVGDLELNIENVIANPPFGHNSNEYRKFFHFIEKNKPKTVYLLWEESQYKKLKKLKDYDIKIIKRYQFPIKPIYFFHTKKKHYINVLFLKGDLREQI

SEQ ID NO: 332 - DNA, 597 bp, Nanoarcheum equitans
gtgtatgccaagaataaaacaactctaattgaattaaaaagaaagttaaaactatacaaaaagggccaatctattttagaaaaaaagctcaatgttttggttttcgaattaataaaaagattaaaaaagataaaacaatatagaaaagaactccaacctattataaaaagcatgtatgaccattattttaagttcgcaacaagtagaggtattttatactcttccttagatgttttagattattccataaaaactaaaaccataaacataatgggagttaaagtattcgatttggagagtaatgttaaagagcaacctcattattatatagatgaaaaccttaaaaaggctagtgaagagcttaaaaaggccatagaaataatattaaaaattgctagcgaagaggatgcagttagaaaattattagtagagataggtaaaaccaaaagaaaaaaactctatttggagaaaaaactaataccaaatgtagagagacatataaaggagataaggcaatatttggatgatgaagaaagagaaaccatcattagaatcgagaaagctatccaagaaagaactagcgataatattatctaa

SEQ ID NO: 333 - protein, 198 aa, Nanoarcheum equitans
MYAKNKTTLIELKRKLKLYKKGQSILEKKLNVLVFELIKRLKKIKQYRKELQPIIKSMYDHYFKFATSRGILYSSLDVLDYSIKTKTINIMGVKVFDLESNVKEQPHYYIDENLKKASEELKKAIEIILKIASEEDAVRKLLVEIGKTKRKKLYLEKKLIPNVERHIKEIRQYLDDEERETIIRIEKAIQERTSDNII

SEQ ID NO: 334 - DNA, 1431 bp, Nanoarcheum equitans
gtgtgggcaattgttgaaaaggttgtccaaaagttgcctacaataaaaaaaccaaaatatttaactaatttggatagattaaaatggagcgcaatcgcagttattttatatcttttattgtcttataccccattaattggggtttctcaaactggggccggagtatttgaggaattggtagttttattaggagcgagctttggatctatagtttctttaggtataggccccataataataggttatctattggcagaactatttattggatctggagagctaaatatagatataaccacagaggaaggcaaaagaaaattcgagaatttagctagattttttatgatagtttttggtttgtttgaatctatagtaatggccacaataggttggtttaagccttctcaatttttaatatctttatttgcaatgcctttttcttttttaggaagtaacgccttcttaataggttatattttagcagttttatttattgttgcacaattaatgttgggagtaatattagcttatttattagatgatttgtctcaaaaatggggttttacctctgggatcaatttatttatattagccacagtatcgagagaattgtttgtgcaattgtttaacccattgacacaaatccctgggactcctactcctccaataggtaaaatcccccaaatcttttatttcatatcccaaggtttatacacagaagcgatagtagtagggttgcaactattagttatagttttagtaatattattgtcggtctatttttatatggttaaaataccaattccaacgagtttcggtaaaattcctgaaaaaagcttaagatacgaagttagattgatatacactgggaatatcccagttatattcgctttcgcatttttacatcaaatattattaatagcatgggttttgcagcaattgggaataccattattaggcacaatagagaatggccatcccattaatggattggtagcctacatttatcccgatacaggctttctaatatctttaattttgggtaatcttactttagataatttaataagaactataacttcttcgctattctttttaggttcatcaatattgtttagtatatattttgtattagccactggccaagattctgaaggtttagcaaaacaattatcaaaaatgtttggaaggataggactaaaaagggattatagaataataaagcattatttggataaaataattccttgtgtaaccgtattaggtggtttcattgttggatttttggctttgctaagttattgggtttctatcccaattggagggacatcgatattgttagcaacgatgatatcttatatggtgtatgaacaattgaaagaaacagggatacttaaagaattaacgcaaatcatttctaaactagaataa

SEQ ID NO: 335 - protein, 476 aa, Nanoarcheum equitans
MWAIVEKVVQKLPTIKKPKYLTNLDRLKWSAIAVILYLLLSYTPLIGVSQTGAGVFEELVVLLGASFGSIVSLGIGPIIIGYLLAELFIGSGELNIDITTEEGKRKFENLARFFMIVFGLFESIVMATIGWFKPSQFLISLFAMPFSFLGSNAFLIGYILAVLFIVAQLMLGVILAYLLDDLSQKWGFTSGINLFILATVSRELFVQLFNPLTQIPGTPTPPIGKIPQIFYFISQGLYTEAIVVGLQLLVIVLVILLSVYFYMVKIPIPTSFGKIPEKSLRYEVRLIYTGNIPVIFAFAFLHQILLIAWVLQQLGIPLLGTIENGHPINGLVAYIYPDTGFLISLILGNLTLDNLIRTITSSLFFLGSSILFSIYFVLATGQDSEGLAKQLSKMFGRIGLKRDYRIIKHYLDKIIPCVTVLGGFIVGFLALLSYWVSIPIGGTSILLATMISYMVYEQLKETGILKELTQIISKLE

SEQ ID NO: 336 - DNA, 969 bp, Nanoarcheum equitans
atggagatatggactgaaaaatataggcccaagagaatagatgatataataaaccaagaagagattaaaaaagcgttaaaaagctttgtagaaaaaaagaacatgccccatttattatttgcaggccctcctgggactggcaaaactactgcagcattagcattggcccacgaactatatggagacgcatggagggagaattttttggaattaaacgccagcgatgaaagaggcatagatgttattagacataaagtaaaagaattcgctagggctaaaccaataggggatgtgccatttaaaatagttttcttagatgaagcagatgcattaacaagagatgcgcaacaagcattgagaagaataatggaaaaatactctcaaagcactaggtttatactaagctgtaactatttcagcaaaataattgagcctattcaaagcagggtaacagtatttaaatttaaacctctagaaaaagaggcttttagagagctaataaatagaattgtaaagggagaaggcctaatattagaaaatgaagatgaaataattaatgctttgtatgatattgcagaaggtgatttaagaaaagcaattaatattttacaagccgcagcgatgatgtccaaaacaattactgttgataggctatatgagatagcctctatagcgaaaccaaaagaaatagatgaagtattaaataaagctatgcagggcaatttcttagaggcaagatcaatgcttatagatctaatgctaaaatatggaatgagtggagaagatgttataaaagctatacaaaagagggtttggtctttaccaataagcgatagggaaaaactaatgattttagataaaataggagatatagagtttagaatagttgaaggggctgacgatttagtgcagttagatgcgctattagcttggttggggttaggtaaatacaaaaactttacttcttag

SEQ ID NO: 337 - protein, 322 aa, Nanoarcheum equitans
MEIWTEKYRPKRIDDIINQEEIKKALKSFVEKKNMPHLLFAGPPGTGKTTAALALAHELYGDAWRENFLELNASDERGIDVIRHKVKEFARAKPIGDVPFKIVFLDEADALTRDAQQALRRIMEKYSQSTRFILSCNYFSKIIEPIQSRVTVFKFKPLEKEAFRELINRIVKGEGLILENEDEIINALYDIAEGDLRKAINILQAAAMMSKTITVDRLYEIASIAKPKEIDEVLNKAMQGNFLEARSMLIDLMLKYGMSGEDVIKAIQKRVWSLPISDREKLMILDKIGDIEFRIVEGADDLVQLDALLAWLGLGKYKNFTS

SEQ ID NO: 338 - DNA, 1857 bp, Nanoarcheum equitans
atggtgtcctttttaataaggaaggctatagaagccctaaaaagaaagaatactccgaaacccttagaaataaatcttaatgttaatatgtctaattcatctaatgcacaaactgtttcgaatccttctataaatcctatgcctagtaatagtactaaccctataactaatccagttcaactcccacaacctatacaacaacccatgcaaccaatgcctgttatagccccagtaatacaggtttcctctatagtcaaaaaaggtaaaaaagagaaaactaaaaaaggagcaataccaataccagagcttactattggggggcaacccatttatataactaaaaaagaagaaattgattataaaaatttctatagagagtaccccctatttgagtataatggaaaggtattagcaaaagccgtgattaaatatgatgaaactttgaaatcactagtttactatgcagtagagccccctatcaatgcaaaggagcgaaaaattattgacgatacaataaatatattattggatagaatagaattggattattatgaactaaaagatgaaacaaaagctatccaacatgtgtctaaattggtggatgaaatttggaaaatgcttaaaataaaattagaccaagataaaaaaatagcattaaaatattatgtttttagggatactgttggctatggtaagatagacccattaatgagagatccttatattgaagatatctcttgcgatggtgtagggattccaatatacatattccataacgatcctataattggggaaattccaacaaatatagtattttcttccgaagatgaattggattcttttgttatgaaattagctcaaagagccggcagatatgtatccgcggcagaaccattgttagatgctacattaccagatggttcaagaatacaaattacatatggaaaagacatttctcgtaggggatctaactttactataagaaagtttagaaaagagccatttactccaataaagttattagaatttggcacagtagatctaaagatattgtcttatctttggctattaatagaggaaggcaaatctatgctaattagtgggggtactgcaacaggtaaaacctctttcttaaatgccctagcaatgtttattcctccaaatctaaagatagtaacaatcgaagatactgcagagctaaatctaatgaatccaaactgggttgcccaggttgctaggcccggttatggccctactaggtatggagaagtctcaatggaagatctattaaaagcagctttaagacaaagaccagattggattattgttggtgaggttagaggaagagaggcctatgtactattccaagcattagccacaggtcattatggtttgggcacaatccatgctgaaactatagaggccctaataaataggcttactactcccccaattagtttgcccaaatccctattagaagctttagatgctgtagtatttttgataaggactaggagaaacgacagaataataagaagggttaacgagataacagaaatacaatattatgatcctaaaaccgattctttaatggttttagactctttctattggagatatagagacgatacatttgtagcaaagaaatcggctttgctttatgaaataatgcaaaccaagggttggagcgaagaagatttgagaaggaatttagcgttaaaaggttttatattaaaatggatgtatgaaaatggaatagatgatttcaaaagatttaatgaagttatatcaatgtattataccgatttgccaggactaatagagaaaataaaagaaggctgggttcctaagaagtaa

SEQ ID NO: 339 - protein, 618 aa, Nanoarcheum equitans
MVSFLIRKAIEALKRKNTPKPLEINLNVNMSNSSNAQTVSNPSINPMPSNSTNPITNPVQLPQPIQQPMQPMPVIAPVIQVSSIVKKGKKEKTKKGAIPIPELTIGGQPIYITKKEEIDYKNFYREYPLFEYNGKVLAKAVIKYDETLKSLVYYAVEPPINAKERKIIDDTINILLDRIELDYYELKDETKAIQHVSKLVDEIWKMLKIKLDQDKKIALKYYVFRDTVGYGKIDPLMRDPYIEDISCDGVGIPIYIFHNDPIIGEIPTNIVFSSEDELDSFVMKLAQRAGRYVSAAEPLLDATLPDGSRIQITYGKDISRRGSNFTIRKFRKEPFTPIKLLEFGTVDLKILSYLWLLIEEGKSMLISGGTATGKTSFLNALAMFIPPNLKIVTIEDTAELNLMNPNWVAQVARPGYGPTRYGEVSMEDLLKAALRQRPDWIIVGEVRGREAYVLFQALATGHYGLGTIHAETIEALINRLTTPPISLPKSLLEALDAVVFLIRTRRNDRIIRRVNEITEIQYYDPKTDSLMVLDSFYWRYRDDTFVAKKSALLYEIMQTKGWSEEDLRRNLALKGFILKWMYENGIDDFKRFNEVISMYYTDLPGLIEKIKEGWVPKK

SEQ ID NO: 340 - DNA, 1068 bp, Nanoarcheum equitans
atggaaataccctcatgtaagatgaggagccaattctatataattgcttttactttattggttttatctttgcctataatatttcagaatatacataaccaatactatatagaggtttttccaaaacaaaaaattgaaaaaccatattacccatactattttctgcaagagttattatgtataggcaattgccatattaatttgaacgaatatagctttttatatggtactgtgaccccttttatagatacaactagtaatttttgtcaatatttttatccaataattataccaaaaagatattattgtgataattggagcgaatatggtaattgtagcataaatctaactattggttccttatacatagatggccatttcaatattaatggcaacaattataatgggcaatactggattattaagaatggcaagaacgtttttgtatataaaatagacccatctaattataattcttatctaacaataaagcagaatttgagtgcatcaaaatttgatagcataacaataaatattacaaaagctaaagaaattaggttctttgaaaaaccttctataccaatcggtataggattattaatgccatttaatagaataaactgcgatttgtattatagcactaatcagaatgtttatttaacattagctaatgccagtttatatagctacaaagttacgtttaccgtaaacaacaattatagtaatgtattggtaaatgttagcttaccaacatggttgagcgatgcttatataatagtctataacgataaaatattaaaattctgctattggaatgggaataactgtaataacataccatcaaacaaaataggggtctattttgatagcttaacgaaagataaaacttatactttttacatctcgctctattgggagaacatatccaattctatgtcctacaatagcataaacccaaatgttagtactagcataatttcatataagggtattccaattagtaattacaaggaagctataccgaataagtttaacacaatatttagaccctttagcactagaaagtaa

SEQ ID NO: 341 - protein, 355 aa, Nanoarcheum equitans
MEIPSCKMRSQFYIIAFTLLVLSLPIIFQNIHNQYYIEVFPKQKIEKPYYPYYFLQELLCIGNCHINLNEYSFLYGTVTPFIDTTSNFCQYFYPIIIPKRYYCDNWSEYGNCSINLTIGSLYIDGHFNINGNNYNGQYWIIKNGKNVFVYKIDPSNYNSYLTIKQNLSASKFDSITINITKAKEIRFFEKPSIPIGIGLLMPFNRINCDLYYSTNQNVYLTLANASLYSYKVTFTVNNNYSNVLVNVSLPTWLSDAYIIVYNDKILKFCYWNGNNCNNIPSNKIGVYFDSLTKDKTYTFYISLYWENISNSMSYNSINPNVSTSIISYKGIPISNYKEAIPNKFNTIFRPFSTRK

SEQ ID NO: 342 - DNA, 1482 bp, Nanoarcheum equitans
ttggaatacaacgtgtattcgaaattgttgataaaaaaatattatgaagaacatccaattactagaccccaattagattcttttaattggctaatagaccatggtttaaaaagaataatccaagaagtaggaaaagtagaattcgaagtaactcctgaaggggttaaagaagcttatttagttgctgtagacatagaagttggaaaagcccaaataatagatatacaaggacccaggataatatatccctacgaagctaggttaaggcaattaacttactctgctccagttagagttagatttcaatattatgaggatggagaattaaaagaagatagatgggttaaaattggagaattacctgtaatggttagaagtaaaatatgtaatacctatggtctaagcgaagaagagttgttaaaagtttacgaagacccattagaccctgggggatatttcataatcaatggggtagatagagtaatagtaatggaagaaaatttagcacctaatcaattttatgtgcaagaaaacaatggagaatatgtagggaaaatgctttctgtaagggggggaagaaaaataccaataacaatagaattgaaaaaagatgggattttgtatttaactttctctaggttagaaaatgtcccattgataccattcgtaaaagtattaggtataaaagataatgaaatagctcaatacttaggtaattacgaagagacttttattaatttattagagtttgccgaccaagattatgaatcaataattctaggaaaaattaagataccaggtttaacaaaagaagaaaaacaagccaaatacgaaagattatatgaaatagtggataactatttgttaccccatattggatatgatccaagccttagaaggttaaaagcaataaacttactaaagtatgcatcgaaattattaaaattagcccatggtgaaataaaagaagatgatagagaccactatatgaataaaagaattttaatggctggcgatttagttggggaattgtttagaagtgcattctatgcacaattgcaaaacttaaaatacatctatcaaaggaatgcaaaaaggaaaaaaattacttctatagaagaattcgtttcagtagatgtattcaatcaaaggatagaaactgctttcgctacaggtcaatgggttggaggcaaaacaggtataagccaactattggatagaactaactatttagctacagtttgggctttgaatagagttaccacatctttagaggaagagaatgaaatgattgaagcaagaagaacccatggtacacattggggaaggttagaccctatagatactccagaagacaaatctataggattaagaaaagctttgactttactatctaaaattactgttgatatagaggaagaaaaaattttgcccataataaaagagttgggtgcaaaattagaatatgagagaaattcttaa

SEQ ID NO: 343 - protein, 493 aa, Nanoarcheum equitans
MEYNVYSKLLIKKYYEEHPITRPQLDSFNWLIDHGLKRIIQEVGKVEFEVTPEGVKEAYLVAVDIEVGKAQIIDIQGPRIIYPYEARLRQLTYSAPVRVRFQYYEDGELKEDRWVKIGELPVMVRSKICNTYGLSEEELLKVYEDPLDPGGYFIINGVDRVIVMEENLAPNQFYVQENNGEYVGKMLSVRGGRKIPITIELKKDGILYLTFSRLENVPLIPFVKVLGIKDNEIAQYLGNYEETFINLLEFADQDYESIILGKIKIPGLTKEEKQAKYERLYEIVDNYLLPHIGYDPSLRRLKAINLLKYASKLLKLAHGEIKEDDRDHYMNKRILMAGDLVGELFRSAFYAQLQNLKYIYQRNAKRKKITSIEEFVSVDVFNQRIETAFATGQWVGGKTGISQLLDRTNYLATVWALNRVTTSLEEENEMIEARRTHGTHWGRLDPIDTPEDKSIGLRKALTLLSKITVDIEEEKILPIIKELGAKLEYERNS

SEQ ID NO: 344 - DNA, 915 bp, Nanoarcheum equitans
ttggggtctagtaattggatgttcttcataatatttttttatcaacaatttcgaatacacgttgtattccaaaaaacgatttttaaaaatttggaaaaatattatttaatggtcgaaacatcgatagttgttatagcatatagggaagaaaagtatataaaatatttgcttgaatctttgttaaaacaaaaatataaagattttgaggttatttttgttactccaaaaaatgatccaacgagaaaagtaatagaggaattcatggaaaaaaacaaagataaaatatttttcgaatggcgcatactagaagacccaggtaaaggcgcaggcattgcaagaaatattggtttattcaatgctaaaggcgaatataccgtatttatagatggagacgtatccttaagcgaagatacaatagagaaaatgattgaagatctaaaaaaacacccaaaccatggcaccaattacccagtaatgctaatatctccaaaatatgacaaagattggttaagtatcccaactattttgttattaaacttcttacagttatttttgttttctcctttaatgaaattaggcacattattaggagcaaaagttggtttaactaatttaactgcatgcagaacaaaggaagcaaaagctatagggggttttagaaacttctggcccggagaagatttagatttccattatagattaaatagtacttttcataaaaagcacaatattgttttatccgcgagagcttggacttcatttagagggtttgcgagatttagcgggaaagcgattaaaaatgagttattattattaataactgccccatatgttttactaatgtatataatacatattgcatactttttaattaaaaagaaaccaatgcaatggaaataccctcatgtaagatga

SEQ ID NO: 345 - protein, 304 aa, Nanoarcheum equitans
MGSSNWMFFIIFFYQQFRIHVVFQKTIFKNLEKYYLMVETSIVVIAYREEKYIKYLLESLLKQKYKDFEVIFVTPKNDPTRKVIEEFMEKNKDKIFFEWRILEDPGKGAGIARNIGLFNAKGEYTVFIDGDVSLSEDTIEKMIEDLKKHPNHGTNYPVMLISPKYDKDWLSIPTILLLNFLQLFLFSPLMKLGTLLGAKVGLTNLTACRTKEAKAIGGFRNFWPGEDLDFHYRLNSTFHKKHNIVLSARAWTSFRGFARFSGKAIKNELLLLITAPYVLLMYIIHIAYFLIKKKPMQWKYPHVR

SEQ ID NO: 346 - DNA, 1146 bp, Nanoarcheum equitans
atgagagaaattcttaaacttgcactaaaaaatatacaaaggcgaaagcttaggtctttgttaacaaccataggagtaacaattggaataggcgcaataaactattttttgatattgtctaaaagtttagagtatggaataattaatacattcgaaagtttgggaaaggataaacttattattttgccaggcaaaagggttggttttagctttagcacagggtggtatttttctaaatcgatagtaaattcgatagagcatttgccttcgataaaatatgttattcctgggaaatttgtaactagcacgatagaacacaaaaataaacaattgaatgttgtaatatatggctttcctttagataaaatgagattgttaacacaattgggatataacttaagagaagggcgattcccttcaaacaataaagaatgtgttgtcggttatggagtatacaaagatttgtctatagagattggcgataaaatatctaataaattcaaatgcaaagttgtagggattttagagcaaataggtagccaaagagaagattatactttaatagtcagcgagaatgttttagagaaacattataatttaaaccaatataattttattttcgctatagcgaaagacattgatttggcaaaaaaagagttatcgaaattgttagataaaacaatcaaagattatactattttaactacagaacaattagctaaaaggtttgcctctttattgggattcgtttccctatttatcagtgctattgccgggattagcttaattaacgccataatagggataatgaatactatgtatatggttattaccgagagaattagtgagattggcatattaagagcgattggggctaaaaaaagagatatattatttttgtttttgttcgaaagcggttttctatccttggttgggggtatagtaggtatagctatatcaacaataattgcattgataactataatagtattcaaatccatgggctttaaggctatattttatattaacccattgattgtattaggattattggttttatctttcgttgttggaattatagcaggtttgttaccatctaaaaaagcttctgaattagaaccagtaaaagcgttaaggagagtttag

SEQ ID NO: 347 - protein, 381 aa, Nanoarcheum equitans
MREILKLALKNIQRRKLRSLLTTIGVTIGIGAINYFLILSKSLEYGIINTFESLGKDKLIILPGKRVGFSFSTGWYFSKSIVNSIEHLPSIKYVIPGKFVTSTIEHKNKQLNVVIYGFPLDKMRLLTQLGYNLREGRFPSNNKECVVGYGVYKDLSIEIGDKISNKFKCKVVGILEQIGSQREDYTLIVSENVLEKHYNLNQYNFIFAIAKDIDLAKKELSKLLDKTIKDYTILTTEQLAKRFASLLGFVSLFISAIAGISLINAIIGIMNTMYMVITERISEIGILRAIGAKKRDILFLFLFESGFLSLVGGIVGIAISTIIALITIIVFKSMGFKAIFYINPLIVLGLLVLSFVVGIIAGLLPSKKASELEPVKALRRV

SEQ ID NO: 348 - DNA, 771 bp, Nanoarcheum equitans
atggcgatccaaagagtaaaaacaggtatccctggaatggacgaactattgaatggaggtataccaaaaagaaatgtagtattgttagctggaggtcctggaactggtaaatctattatgtcgcaacaatacatttattatggtttacaaaatggagaaccaggaatatatgtaacattagaagaacatccagtcgctgttagagagaacatgaaaaatttcggctgggatccaacaccatatgaagaaaagggcatgtttgctatgattgatggctttactgggggtataggcagagcagcagaaagagaaagattcgtagtaccagatccaacagatgttagatctctaattgatgtagtaaaagaagcaatttcttggattgaagagaatactggcaaacccccagttaggggcgtaatagattcagtaacaacattgtatctaaccaaaccaagtgtagcaagaaacatagtaatgatgttaaagaaagtctttagcggttttggtattacagctttcttcgtatcccaagtatctgtagcagaaagaggtttcggtggccctggtgtagaacatgcagcagacggtataattagattagacttagacgaaatagatggagagttggtaagatctctaataatatggaaaatgaggggtactaaacacgatatgagaaggcacccattcgaaataacagacaaaggtgtaatagtatacccagacaaagtagtaaagagaagaaaattggtattagtaaggagctaa

SEQ ID NO: 349 - protein, 256 aa, Nanoarcheum equitans
MAIQRVKTGIPGMDELLNGGIPKRNVVLLAGGPGTGKSIMSQQYIYYGLQNGEPGIYVTLEEHPVAVRENMKNFGWDPTPYEEKGMFAMIDGFTGGIGRAAERERFVVPDPTDVRSLIDVVKEAISWIEENTGKPPVRGVIDSVTTLYLTKPSVARNIVMMLKKVFSGFGITAFFVSQVSVAERGFGGPGVEHAADGIIRLDLDEIDGELVRSLIIWKMRGTKHDMRRHPFEITDKGVIVYPDKVVKRRKLVLVRS

SEQ ID NO: 350 - DNA, 186 bp, Nanoarcheum equitans
atggcccaggtatggaaatactatgaaataaaagatggcaaattaattagaaaaaagaaggtttgcccaagatgtgggtcttttatggcagagcataaagatagataccattgtggtaaatgcggatatacagaatggaaagtagaaagaccaaaaattgttatacatggagcaacaatagaataa

SEQ ID NO: 351 - protein, 61 aa, Nanoarcheum equitans
MAQVWKYYEIKDGKLIRKKKVCPRCGSFMAEHKDRYHCGKCGYTEWKVERPKIVIHGATIE

SEQ ID NO: 352 - DNA, 1902 bp, Nanoarcheum equitans
atgcgggcactgtttttgcattccaataggataaaagtaatcgctagacaaaaggcattaaaggaagcagaccaattagaaaaacctgaatttgatgtaaataaagaacatttagcagtattcgttgctgtagagcatggagacaatttaagcgtggcagaacaattggtcgaagaaataaagaaagttttagaaaaaattgggataaaagaaaaagtagttgtactatatccatatgtacatctaactaacaatccctcttctccaaaattggcaaaagaagtattagataaagcatacgatttattaaaaagtgagggtttcgaggtatataaagcaccatttggttggtataaagaatttgaaatccatgttaaaggccacccattagcggaattgtctagaaccattaagcccaaaaaggttaaaaaagaagaaggaaataaagtctatcttatttacgatggggaaaaagaatatataattgttggaaaaaaggataaaatattagtaaaggactataaagagattgagaataaagaaaaattgcattttgagttgccaaaagatgggatagaattgcctataccaataaaccaagattttgagaaaatggttttgaaagaagtatttagtgaaggagaagaaatagaaaaaaacccattgaatgatgtagcaaagaaatttggatttgaatgggaaccactgtcggattatgggcatatgcgttataaaccttatgctgctctaatggtagatttagttaatgattattctattaaaatagctaaagaattgcctttcccagtttttatagttaaaggcactaacatgtttgatttaaaacaagggcctgttgcagaacatgccaaactattcggagaaagaatgtatgaagtgcaatccgataagtctgtgttcgttttaaggtatgccgcttgctttcaacaattcgctatagccaaagatttaactttgtcttataagaatgtgccctttggtatgttagaagtagcagattcatataggtttgaacaaccaggagaagtggtattagcttttaggttaagaaaattctatatgcctgatttgcatgttttcactaaagacctagacgaagcagtagaacaattcttaaatatgcacaaaaaaattatggaagagataaagaaaattggtagagattatgaattgttgattaatgtagcatcgttcgaggattatgaaaaatacaaatacataatagagcagatatacaaagacgttaagaaacctttattgttagcaatatatcctaaatctgaccaaagatattggattataaatattgaataccatattattgatgttttaggaaggccaagagagattggcactactcaaatagatttacacaatagcaaaaggtttggtataaaatatatagacaaagacggatctgaaaagcatgttattatattgcacaacgccattttaggttctatagaaagatatatttatgctttatttgatactgctctaagaaaagaaaaacctgtattgccattttggataagcccagtacaagtaagggttatcccagttagtgagaaatatttagaatatgctgaacaaatagccaaagaattagaaagcaaatttagagttgaattagatgatagggatgaaaccttaaataaaaaaattaaagatgccgaatcactttgggtaccatatataattgtaataggagaaaaagaaataaaaaataacaaaataactgtaagagacagatatgaaaacaaagtttatgaaactagtttagaagacttaatatcaaaaatggaagaattgcaaaaagggtatccatttagaccattatatgggccaatgaaattatctctaaaacctgctaacctatag

SEQ ID NO: 353 - protein, 633 aa, Nanoarcheum equitans
MRALFLHSNRIKVIARQKALKEADQLEKPEFDVNKEHLAVFVAVEHGDNLSVAEQLVEEIKKVLEKIGIKEKVVVLYPYVHLTNNPSSPKLAKEVLDKAYDLLKSEGFEVYKAPFGWYKEFEIHVKGHPLAELSRTIKPKKVKKEEGNKVYLIYDGEKEYIIVGKKDKILVKDYKEIENKEKLHFELPKDGIELPIPINQDFEKMVLKEVFSEGEEIEKNPLNDVAKKFGFEWEPLSDYGHMRYKPYAALMVDLVNDYSIKIAKELPFPVFIVKGTNMFDLKQGPVAEHAKLFGERMYEVQSDKSVFVLRYAACFQQFAIAKDLTLSYKNVPFGMLEVADSYRFEQPGEVVLAFRLRKFYMPDLHVFTKDLDEAVEQFLNMHKKIMEEIKKIGRDYELLINVASFEDYEKYKYIIEQIYKDVKKPLLLAIYPKSDQRYWIINIEYHIIDVLGRPREIGTTQIDLHNSKRFGIKYIDKDGSEKHVIILHNAILGSIERYIYALFDTALRKEKPVLPFWISPVQVRVIPVSEKYLEYAEQIAKELESKFRVELDDRDETLNKKIKDAESLWVPYIIVIGEKEIKNNKITVRDRYENKVYETSLEDLISKMEELQKGYPFRPLYGPMKLSLKPANL

SEQ ID NO: 354 - DNA, 345 bp, Nanoarcheum equitans
atggtgttagaaataggaagagttgttgttaaaactgccggccgcgaggccggaagagtaggagtagtagtagacattatagataggaatttcgtattaatcgatggcgatttaaagagaagaaaagtaaatgttaaacatgtggaaccaactccaaagaaaatagacataccaaaaggggctgatacgagaacagttgttgaaaaaatgatagaaaatggaataaaagttagcctatggaaattaagaagggacaatctaaaagatttggttgataaattaatagaaaaattcccagaagtaaaagaagatttagagaggttaaaagctataggtaaatggtaa

SEQ ID NO: 355 - protein, 114 aa, Nanoarcheum equitans
MVLEIGRVVVKTAGREAGRVGVVVDIIDRNFVLIDGDLKRRKVNVKHVEPTPKKIDIPKGADTRTVVEKMIENGIKVSLWKLRRDNLKDLVDKLIEKFPEVKEDLERLKAIGKW

SEQ ID NO: 356 - DNA, 261 bp, Nanoarcheum equitans
atggacattaacgaaattagaagacatgtaatggaaggaaaagctgtaataggtacaaacaaaactcttaaattgttaaagcttggacaactttctgctgtagtattagctaaaaatgttcccgattatataaaagaagacatagaatattatgccaaactatctaatataccagtaatacaagtagatttgtttaacgatgaattaggcgcagctctaaagaaaaggtttaaagttagtgttgtaggaatcttaaaataa

SEQ ID NO: 357 - protein, 86 aa, Nanoarcheum equitans
MDINEIRRHVMEGKAVIGTNKTLKLLKLGQLSAVVLAKNVPDYIKEDIEYYAKLSNIPVIQVDLFNDELGAALKKRFKVSVVGILK

SEQ ID NO: 358 - DNA, 411 bp, Nanoarcheum equitans
atggacgatatagttttggcttttgaagccattactggaggtaaaccgatcgcttattatgatgatggtaagagaatactatttgtggtagatggtaaaaatgttggcaaatacataggcaaaggcggaaaaaacgttaagcttttatctacagcattgaaaagagacatatatattgccggttattatgaagatcctgttcaattcataaaaagtttctatagagaattagatataagcgaaatcgtaaaagaaggcaataaatatattgttaaaataaacgatagacaacaaagggctatggctataggaaaagaaggatggagaataaatctattaaatagagctttaaaagaattgtataatgctagtgctgagatttttcaacccaaggaagaaaaccaacaatga

SEQ ID NO: 359 - protein, 136 aa, Nanoarcheum equitans
MDDIVLAFEAITGGKPIAYYDDGKRILFVVDGKNVGKYIGKGGKNVKLLSTALKRDIYIAGYYEDPVQFIKSFYRELDISEIVKEGNKYIVKINDRQQRAMAIGKEGWRINLLNRALKELYNASAEIFQPKEENQQ

SEQ ID NO: 360 - DNA, 291 bp, Nanoarcheum equitans
atgataactataccaacagaggttaaaattttagaagaaacagacaacttaataaaagtacaatttaagggcgaaacccacacattatttaacgcattaaaagagatagcttatacaattaatggggtaaaaaaagctgcatattttatagaacatccattaaaagataataattactttattattgaaactgatggttccataaaagcaagagatgccttaatacaggcattgaaaaaactaaaagaagaattactaaattttaaagattggtactactctaatctttaa

SEQ ID NO: 361 - protein, 96 aa, Nanoarcheum equitans
MITIPTEVKILEETDNLIKVQFKGETHTLFNALKEIAYTINGVKKAAYFIEHPLKDNNYFIIETDGSIKARDALIQALKKLKEELLNFKDWYYSNL

SEQ ID NO: 362 - DNA, 573 bp, Nanoarcheum equitans
atgggattataccaatatgtgagagcattatataaggatccaaaagaatttttaggagaattatataaacaaagaatccaacaatggaggagagaacccccaattgttgaagtggaaagaccaacaagaatagatagggctagggctttaggttacaaaccattgccaggcataaaaattgttagggttagagtaagaaaaggtacaagaaaaagagaagaaataaaagggggaagaagaccaaaagctgagtataggattagacctttgggagttaatttacaatggattgctgaagagagggctaaccgcttacataggaatatggaagtattaggctcttattgggttggagaagatggtttatataaatggtatgaagttattttggtagatccgtttaatcccaatatttataacaggcccgaatatgtttggttattacaaaaaaaccaaaggggtagagtgtttagagggaaaacctctagcgctaggaaatttagggggttaagaaatgggggcttgggcgcagaaaaagttagaccatcaaaaagagccaattttaaagattag

SEQ ID NO: 363 - protein, 190 aa, Nanoarcheum equitans
MGLYQYVRALYKDPKEFLGELYKQRIQQWRREPPIVEVERPTRIDRARALGYKPLPGIKIVRVRVRKGTRKREEIKGGRRPKAEYRIRPLGVNLQWIAEERANRLHRNMEVLGSYWVGEDGLYKWYEVILVDPFNPNIYNRPEYVWLLQKNQRGRVFRGKTSSARKFRGLRNGGLGAEKVRPSKRANFKD

SEQ ID NO: 364 - DNA, 327 bp, Nanoarcheum equitans
atgctaaaccaaatgaagataccatctatgataaagacatattgcccttattgtaaaaggcacacaatacatatagttaagcaagttagaccttccacaaaaaaatctgtattaagtgctggtaaaagaagaatggaaagaaacactgttggtaaaggtaaccacggcaggtatagcagaaggccaataacccaatggaaaagagttggtgttaaaggtggatcaaaaagaatagatttaagattagtttgtgaagaatgtgggaaagctataataaaaacattgccaagaactaagaaattcgaaatagtcccagttaaagcatga

SEQ ID NO: 365 - protein, 108 aa, Nanoarcheum equitans
MLNQMKIPSMIKTYCPYCKRHTIHIVKQVRPSTKKSVLSAGKRRMERNTVGKGNHGRYSRRPITQWKRVGVKGGSKRIDLRLVCEECGKAIIKTLPRTKKFEIVPVKA

SEQ ID NO: 366 - DNA, 597 bp, Nanoarcheum equitans
atgaacgaagaagtagttttacctcctggttataaagtaggtaaaaatgcaataggtgatgtatataaagaaggcgattactattataccaaatacatttccacaataagaaagcagggcgataaaataaaagttatagctctaacaaaagtttataccccttccataggggataatgttatagggatagtttatggtttaaacccaataggtttagaagtaaacatagaagccccatataaagcaataatcccttacaaaattgttggcgatccattgaagttttataataaaatcgtcttcgcaacaattagctctatatccaaggttggtattataactttgtcaaatccaaaaatagtaaacggtttattattaaaaattaaccctgcaaaagttgcgagagttattggtaaaaatggttctatgatcaaaacaataaaagaaaaatttggcgttaatattatagttggaaaaaatggattaataataataaaaggggaaacaaaagatgtggaaatggccgcaaaagtaataaaagaaatagaaaggagagcccataggaaaggccttactgattgggttaagaatctctaa

SEQ ID NO: 367 - protein, 198 aa, Nanoarcheum equitans
MNEEVVLPPGYKVGKNAIGDVYKEGDYYYTKYISTIRKQGDKIKVIALTKVYTPSIGDNVIGIVYGLNPIGLEVNIEAPYKAIIPYKIVGDPLKFYNKIVFATISSISKVGIITLSNPKIVNGLLLKINPAKVARVIGKNGSMIKTIKEKFGVNIIVGKNGLIIIKGETKDVEMAAKVIKEIERRAHRKGLTDWVKNL

SEQ ID NO: 368 - DNA, 1350 bp, Nanoarcheum equitans
atgccgataggtttagagatacatatacaattaaatactgaaacaaagctattttgtccttgtaaaatagatccaaatgcagagcctaatactaatgtatgtgagatatgcctaggataccctggcgcaaagccaaggctaaacaaaaaagctctggaattagcaacaaaaattgctaaagcgttaaattgtaaaataaataagaaaatcctattctctagaaaagtatatttctatccagatttgcctaaaaattaccaaataacccaatatagtaatgttttaggggagaatggttatattgatttaggaaacaaaaagataagaattagagaaatacatattgaagaagacccagcaaaaatagtagaacacaaagaaggatatatattattggatttcaatagaagtggtactccattggtagaaatagttaccgaaccagatttcgaaaatgctgatgaggttaaagcgtttttcaaaaaactattggccatattggattatttagatgcctttgatccagaaaaaggtataatcaaagcagatgttaatgtttctatcccagggggagaaagagtagaagtaaaaaatgtaactggtctaaaaaatatagaacaagccataatttatgaattaactagacaaaaagaaatagtaaaagctgggggtaaaataaagagagaaaccaggcattttatagagaaatccaaaaaaaccataccagcaagggctaaagaatatgaagaagattacggttacatcttcgataatgatctaccatattacgaagtgccagatgttgaattaccaataatgccttgggatctagaaaaagagctaataaatttgggagtacaaaaaaatttagcagaagccattgcgtattattctaaaaagcatgctttcttatttttgaatatagctaaagaaaacaaagagattgctaatgaattagctaaatggtaccaagtgttttttgaaacagaagcagatattaaaacagttgaaaaactaaaagacgaatttattgaagcggtaaaattgtatttaaatggatatctcaataaccaaggtataagaaaatccataaaagagggcataaaggagggctctatactaaaagcagtagagcgctataaaattgtttatccatccgatgaagagatattgagaataataaaacaaaacgggaaagccatttacgattatttaaatgggaaaaaacaggcaattaatgctttactcggctctgtaatgaaggcttaccattcgagagtagatcccaaatgggttctaaataaaatacaagagttaataaataaatactataacaaatccaatggatga

SEQ ID NO: 369 - protein, 449 aa, Nanoarcheum equitans
MPIGLEIHIQLNTETKLFCPCKIDPNAEPNTNVCEICLGYPGAKPRLNKKALELATKIAKALNCKINKKILFSRKVYFYPDLPKNYQITQYSNVLGENGYIDLGNKKIRIREIHIEEDPAKIVEHKEGYILLDFNRSGTPLVEIVTEPDFENADEVKAFFKKLLAILDYLDAFDPEKGIIKADVNVSIPGGERVEVKNVTGLKNIEQAIIYELTRQKEIVKAGGKIKRETRHFIEKSKKTIPARAKEYEEDYGYIFDNDLPYYEVPDVELPIMPWDLEKELINLGVQKNLAEAIAYYSKKHAFLFLNIAKENKEIANELAKWYQVFFETEADIKTVEKLKDEFIEAVKLYLNGYLNNQGIRKSIKEGIKEGSILKAVERYKIVYPSDEEILRIIKQNGKAIYDYLNGKKQAINALLGSVMKAYHSRVDPKWVLNKIQELINKYYNKSNG

SEQ ID NO: 370 - DNA, 1110 bp, Nanoarcheum equitans
atggatgaaaaagaaatagaggaaatactagaggaaaataaaaggctaaaatctatggtaaattatttgcaaaaagaattagaaaaatttagaagtccccccttagttgtagcagaagtaataaagccttatggagaaagagcaatcgtaagattgccaacgggtatggaattgttagtggaaaagctatcaaaaatagaaatagagccaggggatactgtatttctaaaccaatctaatatggttattgtaggcaaagcagaaaaaaggaaaaaattcaacatcgatgcttttgttattactgagaaaccaaatgtagattggtctcaaattggtgggcttaaagagcaaatcgaagaaattagagaggcaattgaattaccattaactaaaccagagatattcgaaaaaataggtatagaacctccaaaaggtgttctattgtatggcccccctggaactggtaaaacattaataggaaaagctttagccaaatccgctaatgccacttttatatatatagtaggttctgagctagttcaaaaatatattggagagggtgcaaaactagttaaagaattgtttgattatgctagggagcacgccccagcgatagtttttattgatgaaatagatgctatcgctgctagaagaatagagactggcacttctggagaaagagaagtacaaagaacttttatgcagcttttagcagaaatagatggttttaaacctttagataaggtaaaggttattggtgcaaccaatagattagatatattagatcctgctatattaagacctggcagattcgatagaataatacatattcctttgcctgacaaacaaggaagaatagaaatattcaaaatacatactaggaaaatgagaactaaagacatagattattcattattagcagagttaaccgaaggttttagcggggcagagataaaacaagtttgtatagaagcaggttatttggcgataagaaataaaagggattatgttatattagaggatttcataaaagcgatagacaaagtaaagaaaatgcgtaaaaaagaggaataccaacgctttttaaaaggtttatcttatttcggctaa

SEQ ID NO: 371 - protein, 369 aa, Nanoarcheum equitans
MDEKEIEEILEENKRLKSMVNYLQKELEKFRSPPLVVAEVIKPYGERAIVRLPTGMELLVEKLSKIEIEPGDTVFLNQSNMVIVGKAEKRKKFNIDAFVITEKPNVDWSQIGGLKEQIEEIREAIELPLTKPEIFEKIGIEPPKGVLLYGPPGTGKTLIGKALAKSANATFIYIVGSELVQKYIGEGAKLVKELFDYAREHAPAIVFIDEIDAIAARRIETGTSGEREVQRTFMQLLAEIDGFKPLDKVKVIGATNRLDILDPAILRPGRFDRIIHIPLPDKQGRIEIFKIHTRKMRTKDIDYSLLAELTEGFSGAEIKQVCIEAGYLAIRNKRDYVILEDFIKAIDKVKKMRKKEEYQRFLKGLSYFG

SEQ ID NO: 372 - DNA, 321 bp, Nanoarcheum equitans
atgctctatttcgatccaaatgttttagttgaaattataaccaatggagaaaatgctgaaaaggcaaaacaaatttatgaaaccattatagataaagaattatatgtctatgaaatacatttgggaatagtattagctaaacttgagagaaaacattatgattatgcaaagactttcgctaatgcaataaaaaaactaaacattaaattattgcatatagatattaaaaagttagttgaactatgggcccaattaggttctatagagaaagctgtatttgagatagcaaaaagggaaggctacgaaattgttacaatttaa

SEQ ID NO: 373 - protein, 106 aa, Nanoarcheum equitans
MLYFDPNVLVEIITNGENAEKAKQIYETIIDKELYVYEIHLGIVLAKLERKHYDYAKTFANAIKKLNIKLLHIDIKKLVELWAQLGSIEKAVFEIAKREGYEIVTI

SEQ ID NO: 374 - DNA, 489 bp, Nanoarcheum equitans
gtgcttcccatggtaacagtaaaagatgtgcctggccaattaatggttgaaaagcttagcgaagtattaaaacaatatgaagaattaaaacctccagagtgggccaaatttattaaaacaaaccctgctaatgaaagacctccagatgagccagtcgaagtttggtggtataaaagggtagcatctgtattaagaagagtatatttattaggcccaattggtttatctaggctaagaaaatattatggaggcacaaaaagaaggagacatggaatgagaaaaaggcacaaagtcaaaggaagcggtaaactattgagatatatattgcaacaattggaaaaagctggtttaatccaatgggttgatagcccaagaaaaggaagggctataacaaagaaaggaaaagaattattagataaagtagcagaagaggttgcgaaagaatattacaagggagaacccaaaatatctttagaagttaaattgtaa

SEQ ID NO: 375 - protein, 162 aa, Nanoarcheum equitans
MLPMVTVKDVPGQLMVEKLSEVLKQYEELKPPEWAKFIKTNPANERPPDEPVEVWWYKRVASVLRRVYLLGPIGLSRLRKYYGGTKRRRHGMRKRHKVKGSGKLLRYILQQLEKAGLIQWVDSPRKGRAITKKGKELLDKVAEEVAKEYYKGEPKISLEVKL

SEQ ID NO: 376 - DNA, 897 bp, Nanoarcheum equitans
atgctattgctctataatatgaaggtatggttcaatggccaaatcttagattacgaagatgtaagaataccaatagatacacatgctttacattatggctcttcagtattcgaaggaattaggtcctataaagcaaaaaagggagtagcagtatttagaaatgaagaccacgtaaaaaggtttttctattcgatgcaaactcttagaatgaaaataaaatttgacgaaaacactattagagaggctataaaagaagttgttagggtaaacaatttagaagattcatatataaggccaattgccttttattctaaaggaggaataggattagacccaagaaaaaatgaagtggatatagctatatttgctataccatggggcaaatatctaaaagaagaagcaagggtaacaattgtttcttatgctaggcctaatactttaataacaaatcccaaagccaaaattggcggtatgtatgttaattctattttagctactttagaagcaaaagaaagaggttttgacgaagctattatgttggatttaaatgggtttgtcgctgaaggccctggagaaaacatatttttaatatacaaagatagcaaaactgcggtaactccaatagaaggttctatattacctgggataactagagatacagtaaaacatttattgagagacctaggttataatgtaatagaaagaaatgttttagtcgatgaactatttatcgcagatgagttattttttgttggcactgcagcggaggttacaccaataaaagaattagatggacaaaccttcgatacaagttttggtaaaaaagtttatgaagaatatatgaaagttgttagaggagaaaacaaaaaatatgaatattggttagattatatataa

SEQ ID NO: 377 - protein, 298 aa, Nanoarcheum equitans
MLLLYNMKVWFNGQILDYEDVRIPIDTHALHYGSSVFEGIRSYKAKKGVAVFRNEDHVKRFFYSMQTLRMKIKFDENTIREAIKEVVRVNNLEDSYIRPIAFYSKGGIGLDPRKNEVDIAIFAIPWGKYLKEEARVTIVSYARPNTLITNPKAKIGGMYVNSILATLEAKERGFDEAIMLDLNGFVAEGPGENIFLIYKDSKTAVTPIEGSILPGITRDTVKHLLRDLGYNVIERNVLVDELFIADELFFVGTAAEVTPIKELDGQTFDTSFGKKVYEEYMKVVRGENKKYEYWLDYI

SEQ ID NO: 378 - DNA, 1065 bp, Nanoarcheum equitans
atgctgcctttaatattaatattactctcagctttattttcctcttacgaaaccgcaatagtttattacccttcctataaaataagggataaaatagtaagaaaacttaaggaagatttggataaaaccttaatcgctatcctaatagcgaataatttcgttaatgttttaatttcagtattagttacggactatttagtaaaccaactagggtttctagggatacttccagcaacaataatagttactattctaataataactttcggggaaataatccctaaatatttagctttggcgagacccgagttaatattaaaattcgccccattgatttatttagttaaattaatattctatccattagtattgttttatcataagttagcatccctttttgggaaagctaataataaattaagtaaaaccgaaataataaatattattgacgaggctataaagaaaagatatttgcaagaattagaaggaaggatggttaaaaaattgttaactttattggatatgccggtaaatgttgttaaaaaaccattatctgattataaattagtaagccatccgacaaatgaaagttttgctttaatctataaaggagacgaagagaatatagttggctatattagagataaccaaatattaaagccattatatgtgcctcaaaacattacaattaaaacattactagaaaagatggttaaatcgcaaaaagatttagcaatagtagtaaacgaatatggagacgctataggagtaatagaattggatgctttgcttagagatttgttatctttaccagattataacatagatgcaatgaaagagcatagatatattattgttgatggagacgaaaatgttaatgatattaacgataaatataatttaaatttgcctctgccaaaaaactattctacaattgctggtttaatattggagaaaacccacagaattcctaaaaaaggagaaaaaataaggataaacaattacgtattagaaatattggatagcgatgataaaaaaataaacaaagtcaaaatttatatataa

SEQ ID NO: 379 - protein, 354 aa, Nanoarcheum equitans
  signal (1)..(19)
MLPLILILLSALFSSYETAIVYYPSYKIRDKIVRKLKEDLDKTLIAILIANNFVNVLISVLVTDYLVNQLGFLGILPATIIVTILIITFGEIIPKYLALARPELILKFAPLIYLVKLIFYPLVLFYHKLASLFGKANNKLSKTEIINIIDEAIKKRYLQELEGRMVKKLLTLLDMPVNVVKKPLSDYKLVSHPTNESFALIYKGDEENIVGYIRDNQILKPLYVPQNITIKTLLEKMVKSQKDLAIVVNEYGDAIGVIELDALLRDLLSLPDYNIDAMKEHRYIIVDGDENVNDINDKYNLNLPLPKNYSTIAGLILEKTHRIPKKGEKIRINNYVLEILDSDDKKINKVKIYI

SEQ ID NO: 380 - DNA, 669 bp, Nanoarcheum equitans
atggtcgtcttaggccaaaagttcccagaagtagaagtacaaacaacacacggaagaatgagattgccagaccattatagagggaagtggtttgtattgttttcccacccagcagactttacaccagtatgtactacagaattcgtagagtttgccagaaactatgacaaatttaaagcaatgaacacagagttaattgggttatcaatagaccaagtatttagccatataaaatggatagaatggattaaagagaaattcaatgtagaaataccattcccagtaattgcagatgaccaaggagaattagcaagaatgttaggaatgatttccccatacaaaggcacaaacacagtaagagcagtatttattgtagacccagaaggttacataagagctatgttatactacccacaagaaactggaagaaacataccagaaatattaagattggtcgaagcattacaaacagcagacaaatatggagtagcaaccccagctaactggcatgtcgatagatacgaattcaaaccatcttcaatagtaggaaacgatgtaataataccaccagcatctagcttagaagaaaagaaagacagagaagaaagagcaaagaaaggcgaaatagaatgcttcgattggtggttctgccacaaaaagctagagtaa

SEQ ID NO: 381 - protein, 222 aa, Nanoarcheum equitans
MVVLGQKFPEVEVQTTHGRMRLPDHYRGKWFVLFSHPADFTPVCTTEFVEFARNYDKFKAMNTELIGLSIDQVFSHIKWIEWIKEKFNVEIPFPVIADDQGELARMLGMISPYKGTNTVRAVFIVDPEGYIRAMLYYPQETGRNIPEILRLVEALQTADKYGVATPANWHVDRYEFKPSSIVGNDVIIPPASSLEEKKDREERAKKGEIECFDWWFCHKKLE

SEQ ID NO: 382 - DNA, 411 bp, Nanoarcheum equitans
atggatatagaaacagatatagaattccctaaaaatattgttggcaatgttctaaaacttttgaataaagacaattataaaataacagacattgtggatgatattttatactatgaaggaacaaaaaattttattgtatatgagaaagatgataaactggtagctttgatttttgataaaataaatttgagcgagtcgtgtgaagaagtattaagcccaataggatgggccgatcttataatatctataataaaagagagccatccaaaatatgagccctgtattataatattttataacctacatggggagaaagcaataattgttaacgaaaaaggagcaaaaacctttgatgaattatgcttgcataaagttaaaaatatggaccaattgcttaatctagaatcttag

SEQ ID NO: 383 - protein, 136 aa, Nanoarcheum equitans
MDIETDIEFPKNIVGNVLKLLNKDNYKITDIVDDILYYEGTKNFIVYEKDDKLVALIFDKINLSESCEEVLSPIGWADLIISIIKESHPKYEPCIIIFYNLHGEKAIIVNEKGAKTFDELCLHKVKNMDQLLNLES

SEQ ID NO: 384 - DNA, 1776 bp, Nanoarcheum equitans
atggttatgatattaattattggatttggaagattaggccagtatttttataattatttaaaaagaaaagggttaaatgttaaagtatattctcgatcgattaaagaaattgaagaaaacgagtttagcaaatttaaatatgctatattggctataccagaaaattcttataatgaaatattatcaaaattaaaagaaaacaattttaatggggtaataatagatttagcctctaaaaaagatgtagtaattcctataatagaacagtatggttttaagtttttatctttgcatcctttgtttgggcccagcatctatgaggaattctctaaaatagttgtaataaaagaaagcacagacaaaagctttttgcaatttttggattttgatttaattgaaatgtctttagaggaacatgaaaaaataaatgaattgcaagttgtaactcatttattgttaatatcttattatcatttcgctaggagattcccaataaaaacagcatctgccgaagctttatatagattgtcagaaagattgttagaacagaacccgcaaatcttattagatatacaaaaagaaaagaatgctaaaacctatagagagaactacatcaaatttttgaaagaagtatcaaacaatatagaagattatataccaaaagagagggtagaaggtttctctagggcattgttattgaatttatcaaaactatggaacaaagatattagaaaacaaattatggttattgacaaactaattttagacttaataaaaataagaaacgatttggcaaagcaaataaaagaaataaaagaactaagaaatttacctatagaggataaaaaatgggaaatagaaaagagaaatattttactagaattcgccaaagaaagagagcttaatcctttgtatacagatcaattaattgaattgctaatatcttgggctaagcatatagaaaatccaaagccttggataggagttttgggcccaataggaagttttagtgatgaagtagcactaaaattaaataaaaccaggctaaatataaaatattatagaaagatatcccatatttttgatgcattggaaaataacgaaattgctttgggtatagtgcctatagagaatgttttaggaggtagtgtgaatgaaaccttggattccctaataaaatacaatgttaaaattgtgggcgagtatatacatagaataaacctatgtttagttggtaaaaatgttaaagaagtaaaaagaataatatctcacccccaagctattgcacaatctatggaatatatttcgaaaaaattccctaatgcagagatagtttattcaaattcaacttctgaagcaatatctatgttagacgagtattctttagcaataacatcaaaaactgcagcaatattctatgggctaaaaatttatgatgagcatatcgaggataataaagaaaacaaaactagatttataattattggtaaaaagcaattgcccaatccaaagtatagcgctttagttttctctttagaagataagcctggctctttaaaagaagtgttggagatattccataaacacaatataaatttaagaaaattagagtctaggcccgacaaaagagagataggtaaatatttattttatgtggaatcagatttgttaaataacaaaatattagaagaaataagagcaaaagctaattgggttaaacatctgggtaactttagagaaataaatgaaatcgaattccctaagattctagattaa

SEQ ID NO: 385 - protein, 591 aa, Nanoarcheum equitans
MVMILIIGFGRLGQYFYNYLKRKGLNVKVYSRSIKEIEENEFSKFKYAILAIPENSYNEILSKLKENNFNGVIIDLASKKDVVIPIIEQYGFKFLSLHPLFGPSIYEEFSKIVVIKESTDKSFLQFLDFDLIEMSLEEHEKINELQVVTHLLLISYYHFARRFPIKTASAEALYRLSERLLEQNPQILLDIQKEKNAKTYRENYIKFLKEVSNNIEDYIPKERVEGFSRALLLNLSKLWNKDIRKQIMVIDKLILDLIKIRNDLAKQIKEIKELRNLPIEDKKWEIEKRNILLEFAKERELNPLYTDQLIELLISWAKHIENPKPWIGVLGPIGSFSDEVALKLNKTRLNIKYYRKISHIFDALENNEIALGIVPIENVLGGSVNETLDSLIKYNVKIVGEYIHRINLCLVGKNVKEVKRIISHPQAIAQSMEYISKKFPNAEIVYSNSTSEAISMLDEYSLAITSKTAAIFYGLKIYDEHIEDNKENKTRFIIIGKKQLPNPKYSALVFSLEDKPGSLKEVLEIFHKHNINLRKLESRPDKREIGKYLFYVESDLLNNKILEEIRAKANWVKHLGNFREINEIEFPKILD

SEQ ID NO: 386 - DNA, 1167 bp, Nanoarcheum equitans
atggcaatgaaaatactattgtttcatccatttttgaaatctatggggggagctgaaaagttaatctatgagtattcgaaaagatcaaaacataaaatatatatcttaagttggatatacattaaaaacaaaacattttcttttgaggctgtatatagtattttaggtaataagttagaaagcatagcaagatcttattttggtaggttattgtttttgcctttgtctttattaaagtttcccgaagattttgatgttttggttatttctacttctggtatatcgattctatcactattgggcaaaaaaattaatatcccaaaattggcttatgtacataccccattaagagcagcttatcctttagacataatatggaatataaattatagatttagacagctaaaaaaatatttctacaaaagcgcatatacaatttataattttttagaaaaaaatgcttggtctaaattggatttcgcagtatttaattcttatttatctagaaaaagggcattagataaaaaactaatagatttagataaaacagcaattatttatcctggagccaatttggaatctctatattataaagaaccagaaaactattttttgtatgttgcgaggtttaatatcataaaaaggcaacacatattaattaaagcatttgcaaagttttctaaaaaatacgattataaattaattttggttggagggcttgagaataaaagatatttcattcgtttgttaaaattaatcaagaaatataatctagaaaatagagtaaagttgctttataatttgccataccaaaaaataatagaactttattctaaagcattggcttttgttcatatcccatttatggaagactttggaatagccccattagaagcagctgcggctggtaaatacataattaatgtatacccttctgggaattatgagatattaaaggattttcctgggatatattggattaaagagagattttacgatgagaagatggtagaagaagtgtataaagcgttagaatattttataaaaaataaagacgaattaatagaaaaaggtaaagagaatagaaagaaaataaaagagctggacttatcatgggataggtttgctaaggagatggataaaataatagaaactaggatagtttaa

SEQ ID NO: 387 - protein, 388 aa, Nanoarcheum equitans
MAMKILLFHPFLKSMGGAEKLIYEYSKRSKHKIYILSWIYIKNKTFSFEAVYSILGNKLESIARSYFGRLLFLPLSLLKFPEDFDVLVISTSGISILSLLGKKINIPKLAYVHTPLRAAYPLDIIWNINYRFRQLKKYFYKSAYTIYNFLEKNAWSKLDFAVFNSYLSRKRALDKKLIDLDKTAIIYPGANLESLYYKEPENYFLYVARFNIIKRQHILIKAFAKFSKKYDYKLILVGGLENKRYFIRLLKLIKKYNLENRVKLLYNLPYQKIIELYSKALAFVHIPFMEDFGIAPLEAAAAGKYIINVYPSGNYEILKDFPGIYWIKERFYDEKMVEEVYKALEYFIKNKDELIEKGKENRKKIKELDLSWDRFAKEMDKIIETRIV

SEQ ID NO: 388 - DNA, 306 bp, Nanoarcheum equitans
atgagagcaaacaaaaatattgataatatactttctatgggaatagcatttaataagactaatggaactaatgtacctataaatactaacaaagtttgtataaaatcctgtaaaaatctatgtataatagtgtatactggcgattcctatagaataatcacagataacatatctaaagagttaaaaaatgtaatagaaattctatctaaatacagattaacagaatatatagaaagcatagaaataaaagagcttacattagaagatgtgttcgcttattttgttaaccagcaatggaaagaataa

SEQ ID NO: 389 - protein, 101 aa, Nanoarcheum equitans
MRANKNIDNILSMGIAFNKTNGTNVPINTNKVCIKSCKNLCIIVYTGDSYRIITDNISKELKNVIEILSKYRLTEYIESIEIKELTLEDVFAYFVNQQWKE

SEQ ID NO: 390 - DNA, 357 bp, Nanoarcheum equitans
ttgtttgctctcattatacaactctcatcctatgctttagcttttattctttctccattgtttgttttatcaggaagcgaatctcttagtttatggggattgctatcagatttaatagaagtgtttctcccaaaaaggattactttatctttcttttggttctatagctttattatactaatactacctttcgttttggttgaagaatttagaaatctcattacggggaaagctgtaaatacatcgtatttaactctggctctgtttttgtctatattatattttgtaatgggttttgaattattcaaaattgctttaaactatgtaaaaagaaaaggtttagttaaactatcctag

SEQ ID NO: 391 - protein, 118 aa, Nanoarcheum equitans
  signal (1)..(24)
MFALIIQLSSYALAFILSPLFVLSGSESLSLWGLLSDLIEVFLPKRITLSFFWFYSFIILILPFVLVEEFRNLITGKAVNTSYLTLALFLSILYFVMGFELFKIALNYVKRKGLVKLS

SEQ ID NO: 392 - DNA, 411 bp, Nanoarcheum equitans
atggaaagaataatagatgtcataaaccatataataattaatacctatctttacattgttttgtttaatgaaatatcgatttatcctattttactatggttggtagtagatttggactattttataggaaaacatagagttactttccataatgttttttatttattttttatttcaatggttttttctataatatatagtaaaacccttctttatacgccaaagttttttgctatattgttatcacatatcatattcgattttctatttgggggagtgtgctttttgtataaactatgtgctaaaggcggtataaaatacgattacctttcgttagagataataagtttggctattaatttatttattttatctatggtgttgtctttttatatcgataaattattctaa

SEQ ID NO: 393 - protein, 136 aa, Nanoarcheum equitans
MERIIDVINHIIINTYLYIVLFNEISIYPILLWLVVDLDYFIGKHRVTFHNVFYLFFISMVFSIIYSKTLLYTPKFFAILLSHIIFDFLFGGVCFLYKLCAKGGIKYDYLSLEIISLAINLFILSMVLSFYIDKLF

SEQ ID NO: 394 - DNA, 1014 bp, Nanoarcheum equitans
atgaaatcgctaatagcatttatagcttttataataaccggtttcctagcaacaaaaattctttcctattttttagagggaataataaaaaagctagtaatagatagcaatactaaaatagacgatataatatacaactctctgcgattacctttactattaatagtgtttttgatatttttgtatattggtattttgttagccccaatacaaatagatattaactttgttaataatgtatttaagtttgtctctattttagttggcacatatgctatagtgaattttgttgatgggatatttgaatattatataataccatgggccgaaaagaccgaaactaaattagacgaacatctaataaagccattaagaaaattaattagattattaataatagtttttggtttattgacagcactaagctctgttggttatgatataacaacaatattagccggtttaggtataggtggtttagccttcgctttggcaatgcaagacacaataaaaaattttatagctggggtgttaattttaatagacaaaccctttactattggggattggattagagttggagatttagaaggaataattgaagaagtaggaattaggagtacaagaattaggacatttgaccaatctttaattacagtggcaaactcttatttattagaaaggcctatagagaattttagcgaaagaacaaaaagaagggttttaattaacattggaataacatatgaaacccctgtagagaaaattgaaaaagcaaaacaaataattaaagaaatattatcctcaaacccaatggttgtaggtccaattagagtgcatttttactcttttggagattggtccttaaatattagggttgaatattatgttaaaaatactaattttgacgaatttttagatactgttgattatataaacaaagagataaaaaggagattcgatttagaagggatagaattcgcttatcccacatatactatatatcaaaaatga

SEQ ID NO: 395 - protein, 337 aa, Nanoarcheum equitans
  signal (1)..(18)
MKSLIAFIAFIITGFLATKILSYFLEGIIKKLVIDSNTKIDDIIYNSLRLPLLLIVFLIFLYIGILLAPIQIDINFVNNVFKFVSILVGTYAIVNFVDGIFEYYIIPWAEKTETKLDEHLIKPLRKLIRLLIIVFGLLTALSSVGYDITTILAGLGIGGLAFALAMQDTIKNFIAGVLILIDKPFTIGDWIRVGDLEGIIEEVGIRSTRIRTFDQSLITVANSYLLERPIENFSERTKRRVLINIGITYETPVEKIEKAKQIIKEILSSNPMVVGPIRVHFYSFGDWSLNIRVEYYVKNTNFDEFLDTVDYINKEIKRRFDLEGIEFAYPTYTIYQK

SEQ ID NO: 396 - DNA, 732 bp, Nanoarcheum equitans
atggatgaagaggaactaatacaactaataatagaaaaaactggcaaatctcgagaggaaatagaaaaaatggtggaagaaaaaattaaagcttttaacaatttaatatctcgtaggggggctttactattagtagcaaaaaaacttggtgttttgtataaaaacactccgaaagagaaaaaaattggcgaattagaaagctgggaatatgtaaaagtaaagggcaaaattctcaaatcttttggattaattagttattcgaaagggaaattccaacctattattttaggagacgaaaccggtactattaaagctattatttggaataccgataaagaattacctgaaaacactgtaatagaagctattgggaaaaccaaaattaataagaaaactggcaatttagaattacatatagacagttataaaattttagaaagcgatttagagataaaaccccaaaagcaagaatttgttgggatttgcatagttaaatatccaaaaaaacaaacccaaaaaggcacaatagtatcgaaagcaattttaactagcttagatagggaattgcctgtagtatatttcaacgattttgattgggaaataggccatatatataaagtatatggaaagcttaagaaaaacataaaaactggtaaaatagaatttttcgctgacaaagttgaggaagcaacattaaaagatctaaaagcttttaaaggagaggccgattga

SEQ ID NO: 397 - protein, 243 aa, Nanoarcheum equitans
MDEEELIQLIIEKTGKSREEIEKMVEEKIKAFNNLISRRGALLLVAKKLGVLYKNTPKEKKIGELESWEYVKVKGKILKSFGLISYSKGKFQPIILGDETGTIKAIIWNTDKELPENTVIEAIGKTKINKKTGNLELHIDSYKILESDLEIKPQKQEFVGICIVKYPKKQTQKGTIVSKAILTSLDRELPVVYFNDFDWEIGHIYKVYGKLKKNIKTGKIEFFADKVEEATLKDLKAFKGEAD

SEQ ID NO: 398 - DNA, 543 bp, Nanoarcheum equitans
gtggtttggcatccctattcggaatgtaaaattttgcactgcgtattagttggttctctacattcactaattatagccaaacccctggcattgcaatttaatatacccatatattattataaagataagcctaaatgcgattattattatgtggtaggtaactatagcgagattcccatcgaatatgatagattgcctggaataaggttttacaactctttaggaatattctatttttttgccaaatacaatgtttcttctattgtatatccaaaagaagatgtgtggcatagctcttttacagagaaacccgtaatattaaaagaaagatatgttcgatacattaaatactggtttccccatataaaagttataagaaatgtttatataccaccaatatttaaaaaaatagaagaaaaagttctaaaaaagtataattattctctaaaaggctatataatagtggcaaacctatttagggttttgtaccattatggctattacgcattatttaatgagtacacaaaaataataaatggatga

SEQ ID NO: 399 - protein, 180 aa, Nanoarcheum equitans
MVWHPYSECKILHCVLVGSLHSLIIAKPLALQFNIPIYYYKDKPKCDYYYVVGNYSEIPIEYDRLPGIRFYNSLGIFYFFAKYNVSSIVYPKEDVWHSSFTEKPVILKERYVRYIKYWFPHIKVIRNVYIPPIFKKIEEKVLKKYNYSLKGYIIVANLFRVLYHYGYYALFNEYTKIING

SEQ ID NO: 400 - DNA, 309 bp, Nanoarcheum equitans
atggaatacatatacgcggcattgcttttacacaaggcaggcaaagaaattaacgaagaaaacttaaaaaaagttttagaagctgctggagttgaggttaatgaaggtatggttaaagctgtagttgctgctttagagggagtaaacattgatgaaatattagaaaaggcttcccaagttactgtagcagcccccgtagcagctccagctccagaacaagagaagaaagaagaaaagaaagaggagaaaaaagaggaaaagaaagaagaagaagcattgggtggtttggcatccctattcggaatgtaa

SEQ ID NO: 401 - protein, 102 aa, Nanoarcheum equitans
MEYIYAALLLHKAGKEINEENLKKVLEAAGVEVNEGMVKAVVAALEGVNIDEILEKASQVTVAAPVAAPAPEQEKKEEKKEEKKEEKKEEEALGGLASLFGM

SEQ ID NO: 402 - DNA, 525 bp, Nanoarcheum equitans
atgagatattcagtaagcttagaaaatgtggcaaagctctatgcacataatttgcctatttcaacaaaacatgctgtagagattgcgaaaatgattagatatttgcctttgcaattagcaaaagaaatgttacaaaaagttttagacaaagaattagctgtgcctttctttagatacaatagagatatcccccataggaaaaaaggacaaatccacccatattttaaaataaaacatggtagattcccagaaaatgccacaaaatggatattaaaagaattaaattctgtagaaaagaatgccattaatttgggaatggatcctaacaaattgtttatagtacatattgcagcacacaaaggagttaggggatatacaagcgtttatgggagaagagcaagaagaaaagcaacccatttagaaataatggttgcagaaaataaggattatgatccctctaagaagtacccattaaaagaattaaaaaggatgggccataaattatttttgagcctcaagaaataa

SEQ ID NO: 403 - protein, 174 aa, Nanoarcheum equitans
MRYSVSLENVAKLYAHNLPISTKHAVEIAKMIRYLPLQLAKEMLQKVLDKELAVPFFRYNRDIPHRKKGQIHPYFKIKHGRFPENATKWILKELNSVEKNAINLGMDPNKLFIVHIAAHKGVRGYTSVYGRRARRKATHLEIMVAENKDYDPSKKYPLKELKRMGHKLFLSLKK

SEQ ID NO: 404 - DNA, 591 bp, Nanoarcheum equitans
atgactactattataggtataaaagcccgagatggtgtagtattagcttcagataaacaagcatctatggggaatatagtagaagacaaaagagcgcaaaagattatacctattactgattatattttattggctggctctggaactgtagcagatttgcaacatatagcaaagatactaaaaaccgaattaaagttaagagagctatattctagaagaacaatgaatgttattgaggcagcgaatttactatcgcatcttttatatcaaaacaggttttatctaaatccattgggtttgttaattgcagggcccataaatagtaaagagtttggaatctatagcttagacggtataggagcaatatctgagataaaagactattttgccgaaggaagtggtggagtaatagctttaggtacattagaagcagagtacaacccagatataactgttagagatgctattaaattagcggaaaaggcattaaaatcctctatagcgagagatgtattttctggttatggtatagaaatatacactataactaaaaaaggagtggaaaaattatttcttgaggctcaaaaataa

SEQ ID NO: 405 - protein, 196 aa, Nanoarcheum equitans
MTTIIGIKARDGVVLASDKQASMGNIVEDKRAQKIIPITDYILLAGSGTVADLQHIAKILKTELKLRELYSRRTMNVIEAANLLSHLLYQNRFYLNPLGLLIAGPINSKEFGIYSLDGIGAISEIKDYFAEGSGGVIALGTLEAEYNPDITVRDAIKLAEKALKSSIARDVFSGYGIEIYTITKKGVEKLFLEAQK

SEQ ID NO: 406 - DNA, 465 bp, Nanoarcheum equitans
atgataggttatttgtttggcaatagggttttagttgatgataaagaattacctttgatagaggcatattatttattagataaaggagaattagaggtttatgaagatgataaaaagctctctaaagaggagttcttaaaaaaatgcttaacctacgatgaaagatttttgattaggtataaggcttacaaagagttaagagataaaggttatactttaggaacagcattaaaattcggtgcagactttagggtttacgatattggggttatcccaaaaaaaggaaagagatccgaaagagagcattcaaaatgggttttatacccagtatctaaagatgaaacatttgatttttacgagtttgcttctaaaaatagggtagcccattccacaaggaaaaaactgttattagggatagtgagtgataaaatagaatttatagaggttagttggaaaaaaccctaa

SEQ ID NO: 407 - protein, 154 aa, Nanoarcheum equitans
MIGYLFGNRVLVDDKELPLIEAYYLLDKGELEVYEDDKKLSKEEFLKKCLTYDERFLIRYKAYKELRDKGYTLGTALKFGADFRVYDIGVIPKKGKRSEREHSKWVLYPVSKDETFDFYEFASKNRVAHSTRKKLLLGIVSDKIEFIEVSWKKP

SEQ ID NO: 408 - DNA, 429 bp, Nanoarcheum equitans
atgcgctatctatccaaaaaagagatcaaagaattgttaaataaatacaaaatagattggctcaaaccggaaaaaaataaatattacgaaaaggattctataatatactacgaagggaaaccattgtttgttgtaaaagaagaggtttatcccacattagaattaataatagagcattataataagaaaggggaattgctattcccttatgttagagtagacaaaggcgcagtaaaaccaattttaaatggggcagatataatgagaccaggtataaaagagtatagccccttcaaaaaaggcgatatagttatagttatagatgagaacgataatgtattaaccttgggcaaagctctattagatagcacagaattggaaaaaatggacaaaggcaaagctataaagaatttgaaaatttttatttaa

SEQ ID NO: 409 - protein, 142 aa, Nanoarcheum equitans
MRYLSKKEIKELLNKYKIDWLKPEKNKYYEKDSIIYYEGKPLFVVKEEVYPTLELIIEHYNKKGELLFPYVRVDKGAVKPILNGADIMRPGIKEYSPFKKGDIVIVIDENDNVLTLGKALLDSTELEKMDKGKAIKNLKIFI

SEQ ID NO: 410 - DNA, 1614 bp, Nanoarcheum equitans
atgcgcgagctgttagataataggttacaatttaatggagaagcttatataataaaggatagcccattgccctcctatgttaaagaattagaaaaggtgggacataaatatagagtaatattcgatatagaaaaggttatagattatttggaaaatcccccaacatataagaaaaaccaaacatacgttttagattacttttctccaaacatcggcaaacccccacatgttggtaacctaagaagtgccattattgggaacccattaaaaaatatactaaggaaagtaggatacaatgtaatatctattaattggtggggggattttggcacacaatttggagaattaatttacgctttcaaaaccaaaggagatgaaaaagagctaaggaaaaatccaataaagcatttgtttgaattgtatacttggtttaatagagaattggagaaaaaccccgaaataaagaattatgctagagaggaatttaaatatttagaagaggcaatgtataagggaattcaaatagatgttagtcctttttttgaagggaaaccattgtccgagctattaaaaaacaaaaccagagaagaacaaaactatattctatggaaaatattcagagaaataactataaaatatatgcgagagcaattttatccaaaactaaaattagaattcgatgaagagagcggggaatccttctttctaaaaaaagctaaagaagttgcaaaagaactattagaaaaaggggttgcagaggaagacaaaaattctataatcgttagaaccccatatggagtagctctattattgaaaagcgatgggactactttgtatttaactagggatttagctgcggctatagagcattatgaaaaatacaaattcgataaaaaaatctatgtagtagcgaatgagcaatcgcaacattttaatcaattaatttatatagctaagaaagccaattatccttttgctgataaattataccatctaaagtttggtttattattactaaaaacagaggaaggtgtaaaaaagttcagcacaagaaaagggagagctgtttttgctgaagacatattagaaaaagcttacgaattggctaaagaagaaatactaaaaagaaacaaagacaaaccattagaagaaatagagaaaaacgcaaaaataatagggtatggcgcagtcatctatgctatagttagatatgatcctaagaaagatataatatttgattgggacaaaatattatctttaaacgggaaaacatctgtgtttatacaatatagtgcagtaagggccaagcacattttagataaatacaataaacctatagagagacctaacaatttagaaaaagatgaagagagattattactatggcttttctattattatgctgtattagaagaaagcgctagaaaattaaaaccaaacattttagctgaatatctatataatttggccgaagaatttaatagattttacgaaaagaatagagtcatcggctctaatagagaaaaagaaagagtttggttagtaaataaaacttatcaaatattaaaggaagggctaaacctcctaggaatagatgtgccaacttttatgtaa

SEQ ID NO: 411 - protein, 537 aa, Nanoarcheum equitans
MRELLDNRLQFNGEAYIIKDSPLPSYVKELEKVGHKYRVIFDIEKVIDYLENPPTYKKNQTYVLDYFSPNIGKPPHVGNLRSAIIGNPLKNILRKVGYNVISINWWGDFGTQFGELIYAFKTKGDEKELRKNPIKHLFELYTWFNRELEKNPEIKNYAREEFKYLEEAMYKGIQIDVSPFFEGKPLSELLKNKTREEQNYILWKIFREITIKYMREQFYPKLKLEFDEESGESFFLKKAKEVAKELLEKGVAEEDKNSIIVRTPYGVALLLKSDGTTLYLTRDLAAAIEHYEKYKFDKKIYVVANEQSQHFNQLIYIAKKANYPFADKLYHLKFGLLLLKTEEGVKKFSTRKGRAVFAEDILEKAYELAKEEILKRNKDKPLEEIEKNAKIIGYGAVIYAIVRYDPKKDIIFDWDKILSLNGKTSVFIQYSAVRAKHILDKYNKPIERPNNLEKDEERLLLWLFYYYAVLEESARKLKPNILAEYLYNLAEEFNRFYEKNRVIGSNREKERVWLVNKTYQILKEGLNLLGIDVPTFM

SEQ ID NO: 412 - DNA, 489 bp, Nanoarcheum equitans
atggaatttttgggcgaactaatttatgacgcagaaggcttagttttaggaaggttggcctctatagtagctagaaacctaaaaaggggctatagagtaaaaatagtaaatgccgagaaagctataattactggggatcccaatatggttaaaaaggaatggctacaaaaagtaaagaggggcgattattataaggggcctttctatccaaagagaccagataatatattaaaaagagttattaggggaatgttaccaaggaaaactgcaaggggcagagagttattaaaaaatgtaaaagtatacataggagtaccagaagaattaaaggataaaccaaaactaggattaaatttggaaaacgctaaaggctacccagaggcattaataaaagaggtgttaaaagcaaaacccaaatttgagaggggtaacataaaatatatagagttaggagaattatccaaatatttgggagcaaaatttacataa

SEQ ID NO: 413 - protein, 162 aa, Nanoarcheum equitans
MEFLGELIYDAEGLVLGRLASIVARNLKRGYRVKIVNAEKAIITGDPNMVKKEWLQKVKRGDYYKGPFYPKRPDNILKRVIRGMLPRKTARGRELLKNVKVYIGVPEELKDKPKLGLNLENAKGYPEALIKEVLKAKPKFERGNIKYIELGELSKYLGAKFT

SEQ ID NO: 414 - DNA, 2136 bp, Nanoarcheum equitans
atgaagattgttgataatgaaaaggatttttataaattgcctatccctaaaacgaacatagctgtttctacaaacccttttaatagggctatacataaagaaatagaaaaacaaatatggcaaggtttccctaggacagatgtccaagtattaagttggtcgggccgaaacggctgggaagcgataccaaaatgggttttcgatactgctgcagatttggctaaagctgcaggtataaaagcttcgatgcacgctcctttagtcgaattagcgggacaaaacgaacaaactagggctcaaacaattgctaagctttttatagctttagatactgctagaaaatttgctactccttcaaataggcatatccctgtaaacacacatgtatctgttgaagcaaaaaggcttttctctaaagaacatgaagaagctgtaaagaaatatttgttagaacaatacaataaagagcatggcactaatataaataattttgatgaattggagaaaaaagaggaattcaaggaatggcttaagaaaaaatacaatgttagagcatgggaagctttagttcccgcagtagatgttattgttgatgaaaatggtagaccaataatggaaaacgcaaatctaaagagttatttcaaaatagaaggtaacatagatgtaaatcgcttatataaagaagaactaaagagaaacctggaaatccaaataaataatgccataattaatgctttagttgctttatcgcaaaatcctgaaaaaccagatttggcattccaacaattaaaaaaccaattagaaagcgtaatatatagtactccattgtcagataaagataaagccgatttaatacacaaactaagaaatggtactttccaaaagataaaggaatcaattgaaaagatgattagtgaaaagagggaagaattagaaaaacttagaaatgaactatcacaaatagaagaacaaataaaaaaggaaaaggacgaaaataaaaagaaagagctacaacagcaatggctaagcaaatatgttgaactaacaaacaaagcccaaattgaattgcctaaagaggaattggaagaaaaattagaagagataaaaaaggaattagaagatagattagagaaaaaacagtttatgacgttatctcaatacactatgcaaaaagtcccagaaacaattgctaaattagcagctttaaatttcgctgagagcgaagcactaaaagctttaggattagaaaaatacgacaaaactccaataatcgctatagagaatgtgttcccagaatttttcggttctagaagtggagaactcgtagaaataataaaagaatcgagagaaaaagtaaaagacgctttagataaattagtaaaagcctatgaaggcaattctgatgatcccgatgtaaaagagtttaaattagctttagacaggataaaactatacttaaaatctgaatatggagaaaaagctgatgaaatattaaaaactatgatagaaaaagccaaagagcttagaaataacgaagccaaattaaaagaatatagcgaaaaatatataggaactacattagataatttacatacaacaatgttattaggcaaacacgaaggttatactgttgatgatttgctaaaagaatatcaaaaaataatagattcaaaaacaataaagcatttgcatatagtagatggttggttaggcgaagaagatgcccatttagctcctgggtctggtataatgcccataaaagagatatatgaaaggttaaaacaagtcaatccccaattagaattattagagaaagacccaaaaactttgaaagaagtattggatagaacattcaatatagaaagtcctacttttgtttttgaagctggtaatgaaataaccttattggaaagcctaggccaaagggaaggccctgtaagagatatatacaaacaaatattaactaacatgaatgctagtatcaatggaattagttacccagaattaagttggactttaccctatactgtaagggttcaaactgtagcagaagatgtatatcaaatgaaaaaacctttatggtctgggttagccatagaaaaattcgatagcacccaagaagatatttataaataa

SEQ ID NO: 415 - protein, 711 aa, Nanoarcheum equitans
MKIVDNEKDFYKLPIPKTNIAVSTNPFNRAIHKEIEKQIWQGFPRTDVQVLSWSGRNGWEAIPKWVFDTAADLAKAAGIKASMHAPLVELAGQNEQTRAQTIAKLFIALDTARKFATPSNRHIPVNTHVSVEAKRLFSKEHEEAVKKYLLEQYNKEHGTNINNFDELEKKEEFKEWLKKKYNVRAWEALVPAVDVIVDENGRPIMENANLKSYFKIEGNIDVNRLYKEELKRNLEIQINNAIINALVALSQNPEKPDLAFQQLKNQLESVIYSTPLSDKDKADLIHKLRNGTFQKIKESIEKMISEKREELEKLRNELSQIEEQIKKEKDENKKKELQQQWLSKYVELTNKAQIELPKEELEEKLEEIKKELEDRLEKKQFMTLSQYTMQKVPETIAKLAALNFAESEALKALGLEKYDKTPIIAIENVFPEFFGSRSGELVEIIKESREKVKDALDKLVKAYEGNSDDPDVKEFKLALDRIKLYLKSEYGEKADEILKTMIEKAKELRNNEAKLKEYSEKYIGTTLDNLHTTMLLGKHEGYTVDDLLKEYQKIIDSKTIKHLHIVDGWLGEEDAHLAPGSGIMPIKEIYERLKQVNPQLELLEKDPKTLKEVLDRTFNIESPTFVFEAGNEITLLESLGQREGPVRDIYKQILTNMNASINGISYPELSWTLPYTVRVQTVAEDVYQMKKPLWSGLAIEKFDSTQEDIYK

SEQ ID NO: 416 - DNA, 1614 bp, Nanoarcheum equitans
atggttaaaaaaagcgaaaacccaaaggaatggtataacgaaatagtaaggaaagccaatattatcgatgacgcttatcccgtaaagggaatgcccgtttataagccatatggatataaagcattcaaatttttgatgtccttattggaaaacaaattagaatctataggtgcagagccggcatggtttcctatagttataccatattctatatttaaaaaagagagcgaacatataaaaggttttgaagaagaggtattttggatagagagagctggtaacgataaattagaagacccactgatacttagacccacttctgaaacagaaatgtattatatgtttgccaaatggatcgaaagctatagggatttacctttaattatttatatgactaataccgtttatagatacgaaaccaaatctacaaaagctctaattagggggagagaggttttatggaacgaaactcattcggtacatagaagtgaagaagatgctagagaacatatggctaaagccaaagaggtttatgattatatattttgggatgtattgtatttgccctacatatgggttagaagaccagaatgggacaaattccctgggggagaagaaacctatgctgcagatgcaataatgccagatggtaggtttttacaagtaggtactatccatttgttagggcaaaaattcgctatcccatttgaaataaaatttttggattatcatcccttttataaaaaatacggagatccaaacatttatataaaagacaaaaacggtaacgaatacaaagttcatgcgccaaaagagttttgggaagaattagaaaaaggtaaattaacaaaaacctatacaataaaaattggggataaagagtatacaatctcttctatagaggaaataaacgaaaaactaaaagaatatgattttagaaaatatgtatggcaaacctcttatgggatatctatgagagcttttggaggcgctttgtattggctaggcgacgatttaggattggttatgccttataaaatagcgccaatacaaatagttattattccaattttgggcaaagacgatacaaaagtaatagagtattctaaaaaagtttatgaattaattaaagacaaatatagagtttatttagattcggacgatacaaaaaccccggggtataaatattactattatgatttgattggggttccattaagaatagacattggcttaaaagaagtggaaaacaatagtataaccatagtaagaagggacaacaaaaagaaatacacaatttctctaaacgagttagaaaagatagaccaaatattcaaagagatggaagaagacctaaaacaaaaagcgaaatcttttgttaatgacatggtagttagagttaaaactttcgatgaattaaaagaagccatagagcaaaacaaaatagcaaaagccccattctgtatgagagaaagctgtgctaaccaaataaaagaattgttacatgcagaggtaagaggcactgatataaaccctgaaaatgctgaaaaagagagatgtgtttattgtggggagcctgcaaaatattgggtttatataggcaaaacttattaa

SEQ ID NO: 417 - protein, 537 aa, Nanoarcheum equitans
MVKKSENPKEWYNEIVRKANIIDDAYPVKGMPVYKPYGYKAFKFLMSLLENKLESIGAEPAWFPIVIPYSIFKKESEHIKGFEEEVFWIERAGNDKLEDPLILRPTSETEMYYMFAKWIESYRDLPLIIYMTNTVYRYETKSTKALIRGREVLWNETHSVHRSEEDAREHMAKAKEVYDYIFWDVLYLPYIWVRRPEWDKFPGGEETYAADAIMPDGRFLQVGTIHLLGQKFAIPFEIKFLDYHPFYKKYGDPNIYIKDKNGNEYKVHAPKEFWEELEKGKLTKTYTIKIGDKEYTISSIEEINEKLKEYDFRKYVWQTSYGISMRAFGGALYWLGDDLGLVMPYKIAPIQIVIIPILGKDDTKVIEYSKKVYELIKDKYRVYLDSDDTKTPGYKYYYYDLIGVPLRIDIGLKEVENNSITIVRRDNKKKYTISLNELEKIDQIFKEMEEDLKQKAKSFVNDMVVRVKTFDELKEAIEQNKIAKAPFCMRESCANQIKELLHAEVRGTDINPENAEKERCVYCGEPAKYWVYIGKTY

SEQ ID NO: 418 - DNA, 417 bp, Nanoarcheum equitans
atggttttaaaagtagtagatagctcttatgctattagagcagattttattccaaaggattcggtaacagttaaagaagcaataaaagagatacaaaaattcgataaagaaaaagcctatagcttaattgctttagaacctaaaaaagaatatatagatttggtaaagcaaaatataaaaggggaaaaattatcgaaaacagatattaaattattggctttggctaaacaattaaatgccatattattaaccgatgacactgatatgcaaagtgtggctttaagattgggaataaaagttaaaggctatagaattacaatagaaaaaccgaagaaaaaaagatatagatgtcccaattgtggaaggttttataacaaaccttattgccctatttgtggtcttcgattaaaccaataa

SEQ ID NO: 419 - protein, 138 aa, Nanoarcheum equitans
MVLKVVDSSYAIRADFIPKDSVTVKEAIKEIQKFDKEKAYSLIALEPKKEYIDLVKQNIKGEKLSKTDIKLLALAKQLNAILLTDDTDMQSVALRLGIKVKGYRITIEKPKKKRYRCPNCGRFYNKPYCPICGLRLNQ

SEQ ID NO: 420 - DNA, 1500 bp, Nanoarcheum equitans
atgataccaatcaatgaaataatattagaggaatataagaaatataaacaaactgaaaagcaatttaaaccccttatagaaaaaacaagggaaaaaattaaaaacttaagcgatgaagaaaaagcaaaggttttgtttgaactatatatctctaaagggataactcccgatctaattgttgatcatattccagaaaagttctatgaattattagaaaaacatagacaaaaatctaaagcggaaaagcataaaaaagaaatagacatcgatgtttctaaatataaacctacagagtttctattttggaaagatactttcttaaaattttgcgaagcaaatctattgggaatagagaaagattatgcgatattcgataaaaccgttttttatccaactatggggggacaagagcacgataccggttatataatagatagagattccttagtatatttgtacaaaacgggccaatattctaaatataatataccattttataaggatgtttatgaatattataaagactaccaatacaaaaaagaagaaatagtctttgttagagttatagatgtaataaagaagggcaaagtaattttacataaagttgatgatatagagaaactaaagaaaatagaaaaccccgtattattaatagattttgatagaaggttacaactatctcgcaaccacactgcggttcatataattacagggatagcaagaaaattgttcggcgaacacatttggcaagcgggggctgagaaaaaatacgaatatgctacaatagatttaacccattataagaatttatctgacgaagagttagagctattagaaaaggaagcaaacaaaatagtaatggaaatgagaccgatcaaaaaatatttcttacctaaaaacgaagcagagaagaggtttggttttagaatataccaaggaggagtagtcccagagaaaatattaagaatagttgagatagaagatttagatgttgaagcatgttctggaacccatttagataatacaatacaagttggctatataaaaatattggcatcaaaaaagattagcgataatactataagaatatacttaactactggaaaccaagcggtaaaggaaatcattaaaagggacaaaatattaaaagaaatatccaaaataactaaaaccgatatcgataatacccccatagcagtaaagaagtttttcgataattggaaagcaatggaaaagaaatatgattctctattaaaagattactttaggctaatacaagagaaaataaataatggcgaatacataataaaagtgagcgatagcctagaactaagtgatctaataaagctaataaaaaaattaatagatctggattgtgttgttttatacaataaaaactatgccgtaggagtaaaatgtaaagaccaaatagaaaaattaggatttagagttagagagagtaaaaacttctttattggtttaatcgaagaccacaaatag

SEQ ID NO: 421 - protein, 499 aa, Nanoarcheum equitans
MIPINEIILEEYKKYKQTEKQFKPLIEKTREKIKNLSDEEKAKVLFELYISKGITPDLIVDHIPEKFYELLEKHRQKSKAEKHKKEIDIDVSKYKPTEFLFWKDTFLKFCEANLLGIEKDYAIFDKTVFYPTMGGQEHDTGYIIDRDSLVYLYKTGQYSKYNIPFYKDVYEYYKDYQYKKEEIVFVRVIDVIKKGKVILHKVDDIEKLKKIENPVLLIDFDRRLQLSRNHTAVHIITGIARKLFGEHIWQAGAEKKYEYATIDLTHYKNLSDEELELLEKEANKIVMEMRPIKKYFLPKNEAEKRFGFRIYQGGVVPEKILRIVEIEDLDVEACSGTHLDNTIQVGYIKILASKKISDNTIRIYLTTGNQAVKEIIKRDKILKEISKITKTDIDNTPIAVKKFFDNWKAMEKKYDSLLKDYFRLIQEKINNGEYIIKVSDSLELSDLIKLIKKLIDLDCVVLYNKNYAVGVKCKDQIEKLGFRVRESKNFFIGLIEDHK

SEQ ID NO: 422 - DNA, 567 bp, Nanoarcheum equitans
atggaatgcttattttgtgctatagcatctgggcaaatcccttcatataaaatatatgaagataacgatttagttgttgttttagacatttatccagcacatccgggccaactattaattattcccaaacaacatgtaacatttatttgggaattggatagagagattttacataaaattttagaagcttcagtaatatttgccaaagtaattggttctatttatccgagtgttacaatttatattcccaatggcccttacgcagggcaaagagttccccatgttgcgatatatataatacctaggcaagaaaatgaccaaaacaaaatagtaatggaatgggccagagaaaaattagacgataatactgctaaagaatgggtagaaaaaataaaaaactatttagatccaatattagaccaatggttggccccaaaacaaaaagaagcaaaacccgaggtaaaagaggaaaaagaagaaaaaccgaaagaagatgtcaaagacattaaacaaaaaatagaagctataaagaaatggtttttagatttaaatgataccaatcaatga

SEQ ID NO: 423 - protein, 188 aa, Nanoarcheum equitans
MECLFCAIASGQIPSYKIYEDNDLVVVLDIYPAHPGQLLIIPKQHVTFIWELDREILHKILEASVIFAKVIGSIYPSVTIYIPNGPYAGQRVPHVAIYIIPRQENDQNKIVMEWAREKLDDNTAKEWVEKIKNYLDPILDQWLAPKQKEAKPEVKEEKEEKPKEDVKDIKQKIEAIKKWFLDLNDTNQ

SEQ ID NO: 424 - DNA, 1206 bp, Nanoarcheum equitans
atgctcgcctatgcctttttaattaaatcgataaaaacgataccttccaatattactattggggacgaacctttattctatataactatattgaatgacaaaaacaaaacctatacagatttagatgtaaaagcccgtagcgaaggattagaaataaattattctaaaacaatagaactattaaaacctagcgaagagttcactttatatctaaaagggaaagctaaaaaagagggttataacgaaattataataaatttgaacgatgaagaattgcacttaccaatttttgttttccccttggataaaatttctatagatgttagccctaatataataaaatatggctggaataccataaaaataaaaattaactctaacctaaatctaaggaatggttatttatatatagagggatgtcccttaaatgttagctctcctttggttttaaacaaaaacgaatataccattaaactctatgctgacaaagattgttatttaaacataactttgagagccaaatcaataatagatataaacaaaacgtttcataaaattctaaaactttctgaggaaaagccatatttattagtttattacgagccaaaaaccattaataagaaaggcaaaatttcattaaaattgctctcttacaataaaataactaacataaaaatttatgctgtatctaacatatcggtatcgcctaacccatattatttgccttttttagatggtagtgccataatagattttgatgtattctctaatagttatggcaaatatccaataaaatttgttatagagtatgagaaagacaataaaaaatacaaaaccgagtatagctcttatgttataataaatgaaaagcctaaaatcgttgttagcactaatttagataaaaatttagaaataaccattgggaatcctaatccatataaactaaagggtgtttatgttacaatagcagataaatcctattttattggagaaattgatcccaatgattatgatacagcatattttaatctaaaaccgggtaaatacaattatacaatctattaccaagactggctcggaaaccaatataaaaaagagggccaaataataattccaaaacaagaaaagaaagagaaaaacaacaattggatttatttgttattggtattgcccttactatatctaattaagcgattgattcgataa

SEQ ID NO: 425 - protein, 401 aa, Nanoarcheum equitans
MLAYAFLIKSIKTIPSNITIGDEPLFYITILNDKNKTYTDLDVKARSEGLEINYSKTIELLKPSEEFTLYLKGKAKKEGYNEIIINLNDEELHLPIFVFPLDKISIDVSPNIIKYGWNTIKIKINSNLNLRNGYLYIEGCPLNVSSPLVLNKNEYTIKLYADKDCYLNITLRAKSIIDINKTFHKILKLSEEKPYLLVYYEPKTINKKGKISLKLLSYNKITNIKIYAVSNISVSPNPYYLPFLDGSAIIDFDVFSNSYGKYPIKFVIEYEKDNKKYKTEYSSYVIINEKPKIVVSTNLDKNLEITIGNPNPYKLKGVYVTIADKSYFIGEIDPNDYDTAYFNLKPGKYNYTIYYQDWLGNQYKKEGQIIIPKQEKKEKNNNWIYLLLVLPLLYLIKRLIR

SEQ ID NO: 426 - DNA, 675 bp, Nanoarcheum equitans
atgcgaatctatagctatacaaaaataaaaacaaaatacggttcgctattattacacaatttggataaattaaaagatttggattatatagggctgttaagagtgttaaacaaatacggctatttaacaatactaaaaccagcagattttaacaatatactaaaaatagagtattctttaaggttaagagaagctaatacatttttcgagctaatgaaaatttatccaaaaaagcttgttccctttttagaaggaatgtttatgtttttggatttatataacattaatgcagatccaaattatttaatacccaccaaatactttaataggtatttcatagaacaatacaaaaaagacccatctataataaaaaggctacccttttatagagaaaacaaaaaagatatggaattagctttactaaaaagcatagctcaaaaggtttacccctattataaagaattatataaatatgtagaatcaatagagcaaggtaacccaacaaatattattgatgaaatggaaaaagatgctaaaagatttatggcttacccattttataatgataagccattcattggattcccattagctttagaagtagaaacaacaaaactttccgctttgattaatgaaaaatatatagagcatttaaagaaaactaaacaattataa

SEQ ID NO: 427 - protein, 224 aa, Nanoarcheum equitans
MRIYSYTKIKTKYGSLLLHNLDKLKDLDYIGLLRVLNKYGYLTILKPADFNNILKIEYSLRLREANTFFELMKIYPKKLVPFLEGMFMFLDLYNINADPNYLIPTKYFNRYFIEQYKKDPSIIKRLPFYRENKKDMELALLKSIAQKVYPYYKELYKYVESIEQGNPTNIIDEMEKDAKRFMAYPFYNDKPFIGFPLALEVETTKLSALINEKYIEHLKKTKQL

SEQ ID NO: 428 - DNA, 273 bp, Nanoarcheum equitans
ttgtataaaattattatagataatagtgatttaatagaaaaagaaatagttagcttggcaagaaaaatatatttcaaaaaaataagagaggcattagagaaaaaagaacaaattttagaagaatatttgaaaaaagctttagaagaaagagaaagaatactaaaaaaagcccaaatagaaaaagaaatagtcaaaaatagaaaggaatcattggaatttctaaagagaagggagaagcttatattagaaaaatggaaacatgcgaatctatag

SEQ ID NO: 429 - protein, 90 aa, Nanoarcheum equitans
MYKIIIDNSDLIEKEIVSLARKIYFKKIREALEKKEQILEEYLKKALEERERILKKAQIEKEIVKNRKESLEFLKRREKLILEKWKHANL

SEQ ID NO: 430 - DNA, 210 bp, Nanoarcheum equitans
atggatctagcgttagcctctgcattggctatagggttagctgcttttggctctgcaatagcccagggcctagccgcatctgctgctgcggcagccacatcagagaaacctgatctatttggtaaaatgctaatatttgcagcattgcctgaaacacaagctatttatggtttagtgatagcttacctattgctttctaaaattgtataa

SEQ ID NO: 431 - protein, 69 aa, Nanoarcheum equitans
  signal (1)..(31)
MDLALASALAIGLAAFGSAIAQGLAASAAAAATSEKPDLFGKMLIFAALPETQAIYGLVIAYLLLSKIV

SEQ ID NO: 432 - DNA, 501 bp, Nanoarcheum equitans
atgtttagacaagcttttgattatctaataaatatagggtttgttgatgtagttataccagttattttggtttatgctattatgtattcgattttagccaaaaccaaaatattaggcgatcctgctaatgacgatgttagggcgagaatatctttgattagtttgtctgttggttttatttttgctgcagctaaaagcgctgtgcatatgttaaaaatatatttaccggatttcgttttggttagcattttcgctttatttggtatggcagcagtaggtgttattttatctaataccgttaaagagaacgaagtttggttagacaaaaaagtcggttatgttttattgggattagcagcattgttaataataatttactttttaccagccccatcgaatgggattagcatagatctaaccccaatatttcaaataatatcagttttagtcacattaggtataatggtaggaatagcctattttataactaaaggttcttaa

SEQ ID NO: 433 - protein, 166 aa, Nanoarcheum equitans
MFRQAFDYLINIGFVDVVIPVILVYAIMYSILAKTKILGDPANDDVRARISLISLSVGFIFAAAKSAVHMLKIYLPDFVLVSIFALFGMAAVGVILSNTVKENEVWLDKKVGYVLLGLAALLIIIYFLPAPSNGISIDLTPIFQIISVLVTLGIMVGIAYFITKGS

SEQ ID NO: 434 - DNA, 198 bp, Nanoarcheum equitans
atggtaaagcaagtgaatgactatattgtcaaaccaagatctaggtttataaaagtaagatgtaaatgcggtaacgagcaaataatatttgatagggcttcaacaattgtaaaatgccacaaatgtggtaatatattggccaaacccacagggggaaaggcccaaatattcggagaaatagttgaaatatatgaataa

SEQ ID NO: 435 - protein, 65 aa, Nanoarcheum equitans
MVKQVNDYIVKPRSRFIKVRCKCGNEQIIFDRASTIVKCHKCGNILAKPTGGKAQIFGEIVEIYE

SEQ ID NO: 436 - DNA, 246 bp, Nanoarcheum equitans
atgcaaataattccagaaagtccagaagtagatttagacaagttattggaaaaggtaaaagaggttataaaagattatggtgaatactataaacatgaagtagagcctttagcttttggattgaaaagtttaatagtttatttcttaattccagaaacatcctttaatgaggagcaatttttagataatattaaacaaatagaagaggtaagcgatgcagaaatattaatggctacgagagcataa

SEQ ID NO: 437 - protein, 81 aa, Nanoarcheum equitans
MQIIPESPEVDLDKLLEKVKEVIKDYGEYYKHEVEPLAFGLKSLIVYFLIPETSFNEEQFLDNIKQIEEVSDAEILMATRA

SEQ ID NO: 438 - DNA, 297 bp, Nanoarcheum equitans
atggtcgaagttgtattcgaggtttcatgcggtaaaacagttacagacaaaatagaattgcccgacaacatacaagggagagaaaaattcaaatatgggggaaaaatggttaaaatgctttgggatttgtataaaaaagccaattgcaatggagcaaaagttaaaataatcgctaaaggcaagaaaaaagctgaaaaaactatagaaatagaaagcgatttagaccatagaaaaagaataggctatggtggtaaagttgtaagaattgtatgggaattgtatgatttagttaaatag

SEQ ID NO: 439 - protein, 98 aa, Nanoarcheum equitans
MVEVVFEVSCGKTVTDKIELPDNIQGREKFKYGGKMVKMLWDLYKKANCNGAKVKIIAKGKKKAEKTIEIESDLDHRKRIGYGGKVVRIVWELYDLVK

SEQ ID NO: 440 - DNA, 2007 bp, Nanoarcheum equitans
atgcgcaagctattaagcttacccctaataacattttttgtattaggtttatctgtaggggaattggtcccaataggtaaaggtagaggcggaaccactgttactataggaccacaagacataaagctcattggggtatcagcaaatccagagaacaagcctgactatacagctacattaactttgtatattacaatagacgaaaatgtttttagtagtgcaggtacatacaatgtaaaacttaggggaactagtgaaaaggtacaagtaacagttacgggcaaatctccaaacttacaaattagtaatataaatgacaaaaataatgatttggcaacatatatatacaaaaaaataacagaaggtttgccaccaaccaattatgttagggttgaatctcctgctcttgttgggaataagtattatgagattaaggttaaactattgccgtttagttctttgccccctattttatggttggtcacaacatccgaagcggaaagtaggtataatagtatttatagtattagtgccaaagctacagcaaatgtttttacaacttttaacgaacaagcaagcattaaaacgataattgcttcttttagtgaggggatgaacttaatagatatacgttctcaattattttcattaagccttgcgaagtacataacaaactctgttaatgagtgttttataagagcatggaaatccctggggtatgaaccagcagataaactatgcaacagaattaattctgaagcttctgcattattatcgaaatttggaatcaatttggatgctgtttacacatatgacactggtagtgggtcttgcactcttaccaaagatgcaaaagcagacgaagaagtaatgagtgttttagaaggtatgggtttcaaaccctcttataatacaatagaagaaatggtttttcaattaaaaaagggagatagatttatttgctggttggatagcgtatttggagcaatatttgggtcgacttattattcaatcaaaggcttattgccccaaaacattaccaatagagagatggtggcattgattattacattatctttatggggtatgttagcttatcttgttataaaaaggatagggccaagcgaagaaaacaaaaacattggtataaaacatttcataggaggtttagctatatcatatttattattaactttgctaggaaacagcctttcaagtatgtctagtgcacatataattggatcgatactattcttgttctttacctacgaaatagtttcttatatcgtggcactcatctcacatcccagattagaagcaatagtatatttagttctatatggtttatatgtaatcgccctctccgttttcctacgaacgatgggtattgtaggaggagcatccgaaggtgtttttaaccccacgaaagcgatagcgctaagcgccgcaatgccctttagtgatattataggtgggatagcaatacctataatatatcaagcattgttaggcttccaagttgggtggttccaagcgatagggtgggcatggctaataacaaaaattattacttacatagcagacttggtaggaataactttaccaccattcttagatgtgtcaaaaaaactaaaagaaaaacttgacaaagatcttggcacatttgaatggcacaagagagagggcaatgaagtagaaattgcaaagagagttataatgaatatcgcttcacaattaagggatttatggacaaacatacattgtagcactcttggggcgagaaaacttttgggaagaaaatttaatccggtgccattaacgggtgcactattatatgttctcagcgatgaggataataaggctctcatactccaaaaaatacctgatgaggatcaaaagaaaatagttgagaatgttttaaacaacaagttagaggaactggctaagagtctagcgaaagatgataagtttaggtcattactcatgaactactgcaaagatagttga

SEQ ID NO: 441 - protein, 668 aa, Nanoarcheum equitans
  signal (1)..(20)
MRKLLSLPLITFFVLGLSVGELVPIGKGRGGTTVTIGPQDIKLIGVSANPENKPDYTATLTLYITIDENVFSSAGTYNVKLRGTSEKVQVTVTGKSPNLQISNINDKNNDLATYIYKKITEGLPPTNYVRVESPALVGNKYYEIKVKLLPFSSLPPILWLVTTSEAESRYNSIYSISAKATANVFTTFNEQASIKTIIASFSEGMNLIDIRSQLFSLSLAKYITNSVNECFIRAWKSLGYEPADKLCNRINSEASALLSKFGINLDAVYTYDTGSGSCTLTKDAKADEEVMSVLEGMGFKPSYNTIEEMVFQLKKGDRFICWLDSVFGAIFGSTYYSIKGLLPQNITNREMVALIITLSLWGMLAYLVIKRIGPSEENKNIGIKHFIGGLAISYLLLTLLGNSLSSMSSAHIIGSILFLFFTYEIVSYIVALISHPRLEAIVYLVLYGLYVIALSVFLRTMGIVGGASEGVFNPTKAIALSAAMPFSDIIGGIAIPIIYQALLGFQVGWFQAIGWAWLITKIITYIADLVGITLPPFLDVSKKLKEKLDKDLGTFEWHKREGNEVEIAKRVIMNIASQLRDLWTNIHCSTLGARKLLGRKFNPVPLTGALLYVLSDEDNKALILQKIPDEDQKKIVENVLNNKLEELAKSLAKDDKFRSLLMNYCKDS

SEQ ID NO: 442 - DNA, 825 bp, Nanoarcheum equitans
atgaaaatctatatatccctaaaggggacaaatctttttccatttattttttataatagagggtttaaaactaaaatgttcgttccattattcgattccactttggaagaagcagaaatagttttagttggatttccattagaagaaggatcagacaaaaaaggctataaagagatacctaaaaaaattagagaatctttcgatgaaatatattatccattaaggaataggttgcctaaagtttatgaccatggcgatatagatttagatatgccattaccaaaggctttagataaaatatatgaaaccgttctatattttaaaagcctaggtaaaaaggtttattctttaggcgggaaccatctaattagttatccaataataaaagctttagaacctagggaattaattatattcgattcgcatccggattgtttttatggcgatttgaattatgccacttgggttaggtatataatagaagaaggtattattaagcctaataaaatagctttggttggtataaataattgggccaaagatgagaaagagtttttagatagctataatataaagtattacgattctatcgatgtgtttttcgatttagataatgtaatacaagagctaaaaaaattcaaaaatccctatgtaagtttagatttcgatgtttttattgataaaggggtgtggagagagcccctaggaataatgccccatcattatttgagaataatttattctttggaaaacatttatggctttgatttggttgaagcgaaagactataaattggctggaagaattttgttggaaagcttttga

SEQ ID NO: 443 - protein, 274 aa, Nanoarcheum equitans
MKIYISLKGTNLFPFIFYNRGFKTKMFVPLFDSTLEEAEIVLVGFPLEEGSDKKGYKEIPKKIRESFDEIYYPLRNRLPKVYDHGDIDLDMPLPKALDKIYETVLYFKSLGKKVYSLGGNHLISYPIIKALEPRELIIFDSHPDCFYGDLNYATWVRYIIEEGIIKPNKIALVGINNWAKDEKEFLDSYNIKYYDSIDVFFDLDNVIQELKKFKNPYVSLDFDVFIDKGVWREPLGIMPHHYLRIIYSLENIYGFDLVEAKDYKLAGRILLESF

SEQ ID NO: 444 - DNA, 414 bp, Nanoarcheum equitans
atgatcgaagaggcgatacattcttacaataacgctgtattctatataaggtctgcgctattagataaaagaacaaaggatacatttatagaagggttaaagagattggcaaaagcatatgaagaaatatttagagctttgttattgctaaaagatgttgaaccccctaaaaatccatatataatgatggaaaaaaccatagaattatatccggaattaaaagagcattacgaattctataaaaaaataaaagaatggttatccaaagatataaaagctgaaaatgaagggactagcaaatttactatatacataaatggcactaccttatatttaaaagatatgcgcaaactttctaaagatttagaaattttgtttgagcgctttaagagatatttaaatgcaatagaataa

SEQ ID NO: 445 - protein, 137 aa, Nanoarcheum equitans
MIEEAIHSYNNAVFYIRSALLDKRTKDTFIEGLKRLAKAYEEIFRALLLLKDVEPPKNPYIMMEKTIELYPELKEHYEFYKKIKEWLSKDIKAENEGTSKFTIYINGTTLYLKDMRKLSKDLEILFERFKRYLNAIE

SEQ ID NO: 446 - DNA, 789 bp, Nanoarcheum equitans
atgcctatagtagttgataaactaatagaatatttcgaaaaagagttgggtaaaccattaaagaacaaacgctattggataaataaagggaaagagggtgatacggttattagtttgtataaagaaaaaccatttatcttaaaaagagtaaaatttgaggacttttataagtttttgtctataagctctgcgaccaaaatgaacaaatttctatttgtgggcaaagtaatagaaaaaccaacatattatttggttgatgtgaaaggcatattcgtatatggagtaaaaaaagtttaccaatgtttaggaaacccagaattcaaaatagaaggagaatttttaaaatacaaactatatagattagataatagggaatatttctatatagagaaaaacttagaaataatgcttaacaccaatgggttaaccataaaccagggcaaagagttaaaacaaagaataaacatggaagaatatatttatactaaatcgatagacccaagagaggttttttcgataatagatagtataataaaagaatttgaacaaaaagctttgtctttagaatatgcagcattaacaaaaaaagatttggcttttagcattaaaagggaatataacgatttagtttttagagcgtggtattgctctagaaaaagtaacataccaaaaatatgcgaaaaccccttggcttataaaccagaattggtttatgaacaatattaccaagggatgaaaaaattagaaatactattattgcctaaagatatagaaataaaagagaaatga

SEQ ID NO: 447 - protein, 262 aa, Nanoarcheum equitans
MPIVVDKLIEYFEKELGKPLKNKRYWINKGKEGDTVISLYKEKPFILKRVKFEDFYKFLSISSATKMNKFLFVGKVIEKPTYYLVDVKGIFVYGVKKVYQCLGNPEFKIEGEFLKYKLYRLDNREYFYIEKNLEIMLNTNGLTINQGKELKQRINMEEYIYTKSIDPREVFSIIDSIIKEFEQKALSLEYAALTKKDLAFSIKREYNDLVFRAWYCSRKSNIPKICENPLAYKPELVYEQYYQGMKKLEILLLPKDIEIKEK

SEQ ID NO: 448 - DNA, 891 bp, Nanoarcheum equitans
atgaaagtttttgttcaatacccagaggggctaaaaaataaactattcgaaatagagcaaaaattaagagaaaaaggttataatccaatatttgatgcagaaccaacctatgggttttgtgatttgaaagatgatatagcaatagagttaggttgcgaagctataatacatataggacataactctttcggttttgagcatttgctaaaaaattctaaaatcccaataattatagaggaatatagatacgaaatagatgaagaagctgtaaacgagacattaaaatatatagatgttataaagcataaaaaattgggcatagttagctctttgcaatatttgaattatgtgtattatttgaaggacaaactaaaaggtttcgaaatagttataccaaagaacccccaaatattgggatgcaatgtaattaatgctaaatccatagaaaataaagttgatgcttttttaattccaacagatggcaaattttatagcttgggattagccttacaaacgaacaaaccagtatacgctttcgatctaggattaagaaaaatttatagcttagaaaaagaaaaacagaaatatttaacaataaaatggttttatttatccaaattcgaagaagcaaaaaaagttggtatcttagtttcatggaaaaagggccaactattttataacccatatgaagttaaggaaaaaatagaatcgctagggaaaaaagctattattttagctttcgatgaaatagatcctaacaaaataattggcttagatttagatttttatgttaatttggcctgtccaagaatttttgataattataaaaaatttgacaaacccatattgaattgggtagacatttttaaacattattttgttaaaagctaa

SEQ ID NO: 449 - protein, 296 aa, Nanoarcheum equitans
MKVFVQYPEGLKNKLFEIEQKLREKGYNPIFDAEPTYGFCDLKDDIAIELGCEAIIHIGHNSFGFEHLLKNSKIPIIIEEYRYEIDEEAVNETLKYIDVIKHKKLGIVSSLQYLNYVYYLKDKLKGFEIVIPKNPQILGCNVINAKSIENKVDAFLIPTDGKFYSLGLALQTNKPVYAFDLGLRKIYSLEKEKQKYLTIKWFYLSKFEEAKKVGILVSWKKGQLFYNPYEVKEKIESLGKKAIILAFDEIDPNKIIGLDLDFYVNLACPRIFDNYKKFDKPILNWVDIFKHYFVKS

SEQ ID NO: 450 - DNA, 210 bp, Nanoarcheum equitans
atgctaaaacaaagtgggcataaacatggtaaactattaaaaatattaaaacataataaacctaaagaaagaaaatttggcaaaggcgctaggagatgcgaaaggtgtggtagatacgatggtataataagaaggtatggactatatttatgcaaagactgctttaaagaagtggcacacgaattaggattctttaaatggggagaatag

SEQ ID NO: 451 - protein, 69 aa, Nanoarcheum equitans
MLKQSGHKHGKLLKILKHNKPKERKFGKGARRCERCGRYDGIIRRYGLYLCKDCFKEVAHELGFFKWGE

SEQ ID NO: 452 - DNA, 417 bp, Nanoarcheum equitans
atggggagaatagatagcatagacataaaaattttatctattttagaggaaaacgctaggacaaaatttactgatatagctaaaacattaaaccttacagaggcagcaattagaaaaagaataaagaaactggaagaaaaccaaataataaaacgctattctatagatatagactataaaaaattaggatacaacatggcaatcattggcttagacatagatatggattatttcccaaaaataataaaggaattggaaaaaaggaaagagtttttgcatatatattcatctgcaggcgaccatgatataatggttatagcaatatacaaagatttagaggaaatttataattatttgaaaaacttaaaaggagtaaaaagggtttgcccagcaataattatagatcaaattaaataa

SEQ ID NO: 453 - protein, 138 aa, Nanoarcheum equitans
MGRIDSIDIKILSILEENARTKFTDIAKTLNLTEAAIRKRIKKLEENQIIKRYSIDIDYKKLGYNMAIIGLDIDMDYFPKIIKELEKRKEFLHIYSSAGDHDIMVIAIYKDLEEIYNYLKNLKGVKRVCPAIIIDQIK

SEQ ID NO: 454 - DNA, 894 bp, Nanoarcheum equitans
atgagttatgatattattggagaaatcgctataatttatccccctgttgatgatttagataaaattgtaaacaaaatattaaagcatcacaaatatgttaaagccatatacctaaaaactgacaaattagaaactgaattaagattgcctaaactaaaactattatatggagaaccaatattggaaacaacctataaagaaaacaaatgtgtgtttaaattaagagtagataaagtctatttctccccaaggcttagcacagaaagaaaagagtttatagatctagttaaggacaatgaaaaaattttaataccctttgcaggggttaacccatatcctattgttattgctaaacatagaaaagttcaaataaaatctatagaattaaatccatgggcagtaaaatatggaataataaatactaaactaaacaaagttaatgtcgatacaattttagccgattttggaatagcttggaaatatataagaaatttgcataacaaagaggggattgtaacaaaatatgttaacgaattattaaaagctaaaccagaattggatttggtttatactaatgaagaatattacgatttgctaaaccaatattataataccaaattgatagaagagctgaagcctggtatagaatatttcgatcgaataataatgccccttccaaaagggggagagcattttatttttgaagctttagttttagctaaaaagtatatccatttatatagtttcgcccatgaaaaagagatagaacaaaaagtaaaagaaataattgatatagcaagccaactaagagaaataaaacattatgattataaaattgtgggcgacattggagtaagaaaatataggataagaattaatatttatttaatttga

SEQ ID NO: 455 - protein, 297 aa, Nanoarcheum equitans
MSYDIIGEIAIIYPPVDDLDKIVNKILKHHKYVKAIYLKTDKLETELRLPKLKLLYGEPILETTYKENKCVFKLRVDKVYFSPRLSTERKEFIDLVKDNEKILIPFAGVNPYPIVIAKHRKVQIKSIELNPWAVKYGIINTKLNKVNVDTILADFGIAWKYIRNLHNKEGIVTKYVNELLKAKPELDLVYTNEEYYDLLNQYYNTKLIEELKPGIEYFDRIIMPLPKGGEHFIFEALVLAKKYIHLYSFAHEKEIEQKVKEIIDIASQLREIKHYDYKIVGDIGVRKYRIRINIYLI

SEQ ID NO: 456 - DNA, 3051 bp, Nanoarcheum equitans
atgtattctccagagatagaaaagcaaatattagaatattggaaatctataggattaacgcataggctattagcaaaatctttgaaaagtgggaagaaatggtcttatttagatggtccaccattcgctaatgacgatatacatgtgggccatgcctggggtagggcattaagggattctgaaatcagatatagactaatgagaggttataaaatatatgttaggcccggttttgatactcatggtttacctatagaggttaaattagaaaaagagcacggttttacaaataaggatgatataattaaatatggggtagacaaatttatagaagaagcgagacaattcgcttacaaaaatataaacaaacaaataagctctttcaaaaggttaggggtattagcagattatgataatccctattttacttacgataataactatatagaaagaatatggaaaataattaaaaaagcctgggaagaagggttattatacaaaggtaaatatgtagttcattggtgtcctagatgtcaaacagctttagctccaaactatgaagtaatatataaagaagtggaagatccttctatttttgttaaattccctctaaaaaatgaagatgcttatctattaatatggactactactccatggactttgccatacaatttgggagtaatggttaaccctaatgctacttatgttttagttgagttagagaatggcgaaaagctttatatagctaaagatagattaatagttttggtaactttgggacataaatacaaaatactaaaagaagtgcaaggcaaagacttagagggattagaatattatcccccattctatgaggaatggaaagaaatatatgacgaattgaaaaaacaatacaaaaatgtacataccgtatggttaagcgaagaatatgtctctttagaagaaggtactggtttagtacatgctgccccaggttgtgggccagaagattttgaagtcggtctaaaatacaatgttcctccatttaatgatttgaaagaagatggttcctttgttagagagccatttaaaggctgggtagccaaaaaagatgacgataaatttatagaattattagagaaaaaaggattactattccataaagacaaaataaagcataattaccctgtatgtgagagatgtaagagtaagcttatatttagagttacagaggaatggtattggaaagtaactgcatacaaaaacaaaatgattgaggaagcatctaaagtcaattgggttcctgaaaaggctaaaagagctatgttacaatggctatccaatataagagattgggccatttcaagacaaaggttctggggtattccattgccaatctggaaatgtgaaaataatcattatttagttatctcttcgaaagaggaattagaaaagtattctgggttaacattaaaaagatttataataatagttaagcacaaagaattagataaagattatataaaaacccattttggagattttatagaaaccgatgatgtagaatcggtaatagaaaaagagaaagaagcaataatattaacaaatagagacgcaaacgaattagagcaaaaactaaaagaaaaatactatgtatataggtttggaggcgattcttatacgatattaagagtgtattcttatgatttgcataaaccatggatagacaatatagaaatcaaatgccctgtatgtgggagaccaatgaagagagagcccgatgttttagatgtatggctagactccggtggggctttctatgccacattcgataatgaagaggcttataaaatattttatccattcgactttatattagaaggctgggaccaaataagagggtggttctattctctattgggagaaggcgtattatatactaaccaaagtccatacaaaaatgtatatgttagcggttttgtattggatgaacaaggtagaaagatgtctaaatcgttaggcaatttcatatatgcaagagagctaatggaaaaatatggagcagatgctgttaggctattcacaatacaagcgactgggccttaccaagatttaatattaagaatagacggaataaaggagaaacaatccaacttaaatatactatataatatagtaaaatactatttcgatcaaaaagaatatctaaaagtaaacccagaacccaaaaaattgaacattgttgaccaatacgttatatacaaaataaacaaagctattgaagaaactattaattacttcgagaactatcaaatatggaaagcgccaaaacccttagaggaattctggttagagctaagtaggttctatataaaagtcaatagagaaagaatagaaaaatcaaaagatgatgcagctactattttgtatgtattaaagtatagcttagacaaactaataagagccatagccccaataattccatttagtgccgaatatctatatcaaaaaatgagagacgaattaggttataaagaggaaagcgtacatctattgccttatccagaaccagagaaaatagagttccaatatttagaggaaatagaaataatgaaaaaagtaatagagatggccaattctttaagaaacaagcatggaataggaattagatggcctttaccaaaattgtatataagcaagcaattgcctaaagagatagaagagatattaaaagaagtattgaatgtaaaagaaatagtttatactaaagaaggaatagatgatgttatcgttaatgacatagaagtcggcttaagctttaaattagatagcaatctaataagggaaggcctaataagagaaaccataagaagaatacaagaagcgaggaaaaagctaaaactaaagaaataccaacctataaagttaaaaatagaaggtatcgattataaaggcttcgaagatttaataaagaatagagttaatgccgaatttagcgaaaacgaagaatgggatttggttgaggaatacaatataaaaggccataaagttaaaattttcgttaaaaaatga

SEQ ID NO: 457 - protein, 1016 aa, Nanoarcheum equitans
MYSPEIEKQILEYWKSIGLTHRLLAKSLKSGKKWSYLDGPPFANDDIHVGHAWGRALRDSEIRYRLMRGYKIYVRPGFDTHGLPIEVKLEKEHGFTNKDDIIKYGVDKFIEEARQFAYKNINKQISSFKRLGVLADYDNPYFTYDNNYIERIWKIIKKAWEEGLLYKGKYVVHWCPRCQTALAPNYEVIYKEVEDPSIFVKFPLKNEDAYLLIWTTTPWTLPYNLGVMVNPNATYVLVELENGEKLYIAKDRLIVLVTLGHKYKILKEVQGKDLEGLEYYPPFYEEWKEIYDELKKQYKNVHTVWLSEEYVSLEEGTGLVHAAPGCGPEDFEVGLKYNVPPFNDLKEDGSFVREPFKGWVAKKDDDKFIELLEKKGLLFHKDKIKHNYPVCERCKSKLIFRVTEEWYWKVTAYKNKMIEEASKVNWVPEKAKRAMLQWLSNIRDWAISRQRFWGIPLPIWKCENNHYLVISSKEELEKYSGLTLKRFIIIVKHKELDKDYIKTHFGDFIETDDVESVIEKEKEAIILTNRDANELEQKLKEKYYVYRFGGDSYTILRVYSYDLHKPWIDNIEIKCPVCGRPMKREPDVLDVWLDSGGAFYATFDNEEAYKIFYPFDFILEGWDQIRGWFYSLLGEGVLYTNQSPYKNVYVSGFVLDEQGRKMSKSLGNFIYARELMEKYGADAVRLFTIQATGPYQDLILRIDGIKEKQSNLNILYNIVKYYFDQKEYLKVNPEPKKLNIVDQYVIYKINKAIEETINYFENYQIWKAPKPLEEFWLELSRFYIKVNRERIEKSKDDAATILYVLKYSLDKLIRAIAPIIPFSAEYLYQKMRDELGYKEESVHLLPYPEPEKIEFQYLEEIEIMKKVIEMANSLRNKHGIGIRWPLPKLYISKQLPKEIEEILKEVLNVKEIVYTKEGIDDVIVNDIEVGLSFKLDSNLIREGLIRETIRRIQEARKKLKLKKYQPIKLKIEGIDYKGFEDLIKNRVNAEFSENEEWDLVEEYNIKGHKVKIFVKK

SEQ ID NO: 458 - DNA, 198 bp, Nanoarcheum equitans
atgcccaagccaaagaggaaggtatgtctaaaatgtaaagccatactccccatggatgttgagaaatgcccttactgtgggggcacagagtttacaacagaattcgaagggataataattatagtaaataaagagaaaagcgaagtagctaaagtggctggtattgataaagaaggcaaattcgccattaaaatataa

SEQ ID NO: 459 - protein, 65 aa, Nanoarcheum equitans
MPKPKRKVCLKCKAILPMDVEKCPYCGGTEFTTEFEGIIIIVNKEKSEVAKVAGIDKEGKFAIKI

SEQ ID NO: 460 - DNA, 525 bp, Nanoarcheum equitans
atggatccaaagaaaatatctgttttggaaaaacatggtttcaatgtgccgaaaagggttattggaaaaaaagccccattcaaagaatgctcagcaagggtttttggagagatagattttgaaaagctaaaaaattacaaatacaaaatttctaaccataaaccttactttgtttattacctaaaaccttgtaatttggatttcgcagatggttatgtagaaatatacgatgtaacaaataaagatgttattgcctctttaattatagattataagaacaaatattttgaaggggaaaaccaaggctatataagaaggattactagagaaggaataaaagagttttatggacatttcaaaaattatttagagattaatggttttattaaaagcgatttagtttatagagtaataaaagagttaataaagaaaaacatagatgggatcgttgaaattactatacatagacataagcatggagtgtttagaaaaaactatattgcttgggagtttataccacaatag

SEQ ID NO: 461 - protein, 174 aa, Nanoarcheum equitans
MDPKKISVLEKHGFNVPKRVIGKKAPFKECSARVFGEIDFEKLKNYKYKISNHKPYFVYYLKPCNLDFADGYVEIYDVTNKDVIASLIIDYKNKYFEGENQGYIRRITREGIKEFYGHFKNYLEINGFIKSDLVYRVIKELIKKNIDGIVEITIHRHKHGVFRKNYIAWEFIPQ

SEQ ID NO: 462 - DNA, 906 bp, Nanoarcheum equitans
atgatgttacaatttttcatcgcatctttaatagaatactatttgcataaatcaataattttatttttgttgccattgtatttattgcttattttatatactaagctaattaagataaaatttttaagaggggataaactaactattaaaataaaaaacagctttttgcctatagttgtttcgatagagtttttaacaaaaaatgggcatatcgaaaatatattagtaagtttatatccatttgaggaaaaaataataaaaactccttacgaaggaaacccaacgatatatggctataaaataaaccctttgttttttattaacgaaagccctgtaaggttttttgtattacctttaagaaaaaagagatatcccataaaattgctaaaagcctctatattaaagggcaatactattatgaaagttaaagccaaagagggattagaattttatggaatagaagaatataaatatgggcctgcccgttatataaattggaaaaaatcaatgaaaggaaaactttatgctaatatattccatatggaaggacatgctaaaatagttatagcagtagtaagctctgtaataaatatagaatactgggaatacatattggatgttttggcatttctaaaaaactattttaggggacacaaaataatagtttattcggtaaactctaaagaatgtaggaagggcgatccaattattaatgattacaaagctaagcccaaatataatattccaatattgtatcaaattaagtttggtttaatcaaagcgaaacctttgtcttataaaatgaaatgggactgctttttaaaggaaaaagctgacttaaaaataattattacatcgaaaaactatccaataaagtttaagaacgctataactattgtggtataa

SEQ ID NO: 463 - protein, 301 aa, Nanoarcheum equitans
MMLQFFIASLIEYYLHKSIILFLLPLYLLLILYTKLIKIKFLRGDKLTIKIKNSFLPIVVSIEFLTKNGHIENILVSLYPFEEKIIKTPYEGNPTIYGYKINPLFFINESPVRFFVLPLRKKRYPIKLLKASILKGNTIMKVKAKEGLEFYGIEEYKYGPARYINWKKSMKGKLYANIFHMEGHAKIVIAVVSSVINIEYWEYILDVLAFLKNYFRGHKIIVYSVNSKECRKGDPIINDYKAKPKYNIPILYQIKFGLIKAKPLSYKMKWDCFLKEKADLKIIITSKNYPIKFKNAITIVV

SEQ ID NO: 464 - DNA, 903 bp, Nanoarcheum equitans
atgcttgccccattaataaaagagataaacaaagctgtaataggctatgatgatgttgttataaaattgtttatcgctttagtaaatgaaggccatgttctattagaaggccctcctggaatagcaaaaaccactttagcaaaagcttttgctaaagctataaatttgcaattcaaaagaatccaatttgtgccggatttattgccttcagatataactggctattttatttacaggaataaccaattagagttcattaaaggtccaatattcgctaatattattttagctgacgaaataaatagggctcctccaaaaacgcaaagtgctttgttagaagcaatgcaggaaaaacaaataacaatagaggggaaaacatttcaattacctaaaccattttttgttattgctactcaaaatccaatagaagaagaaggcgtatacccattacctgcagcacaattagatagatttatgtttaaaatagaaatgggttatccaaaagattatagtgcaataatagagaattatccatatttttctttagacaacataaaaccggtaataaatttagaatttatcgaatttgtaaagaataatatttctaaagttagggtaagtagaagggttatagactatattttagatttggttaaaagaataaacaacaataaagctgtagcttttggtatttctcctaggggggttatatatctaataaaagcggcaaaaactttggcttttcttaataatagggaatatgttattactgatgatataaaatatctaattatggattgctttaggcatagaatattcctaaacccagaatttgaagttaaacccgaagaaataattgaagatgcaatattgcatactaaagttccagaagaaagactatga

SEQ ID NO: 465 - protein, 300 aa, Nanoarcheum equitans
MLAPLIKEINKAVIGYDDVVIKLFIALVNEGHVLLEGPPGIAKTTLAKAFAKAINLQFKRIQFVPDLLPSDITGYFIYRNNQLEFIKGPIFANIILADEINRAPPKTQSALLEAMQEKQITIEGKTFQLPKPFFVIATQNPIEEEGVYPLPAAQLDRFMFKIEMGYPKDYSAIIENYPYFSLDNIKPVINLEFIEFVKNNISKVRVSRRVIDYILDLVKRINNNKAVAFGISPRGVIYLIKAAKTLAFLNNREYVITDDIKYLIMDCFRHRIFLNPEFEVKPEEIIEDAILHTKVPEERL

SEQ ID NO: 466 - DNA, 714 bp, Nanoarcheum equitans
atgcgttgtttgctatgtggaaaagaaaccgataaaactatagaaggtttgtgcttagattgctatataaagaaaaatcctcctttaattaaaattagccctatagtagtttgcaaatattgtggtaaagtaaaagtaggtaaggtgtggaaaaaaatagatataaaaaaattggtaaaagttaagcccccttacaaattagaatccatcgaagatgggatagttttatccttagaaggagagctgttcaaattcgattataatgtgccaataaactatggaatatgtccccaatgtgctagacaacaatccgaatactatgaaaccattttacaattaaggggggaaaatgccattaaagaagcattaaaaattattggtcaaagacaatacagaatatcgaaatatgaagagaaagaagaaggcttagatctatatatggtaagttatagggaagcggaaaagctagtaaaagaactaaaacaaaaaataaatggaataattaagaaaaccttcaaattacatacgagagacaaacaaacatcgaaagatatttatagatcgaccatattgtttagggaagttaagctaaaagaaggacaaactttaatccacaatgggaaaaaatacaaagttctaaaagttagtgacgattatgttattgtgagacatggtaatgaaatagcgcgtattccattaaagaaattaatataa

SEQ ID NO: 467 - protein, 237 aa, Nanoarcheum equitans
MRCLLCGKETDKTIEGLCLDCYIKKNPPLIKISPIVVCKYCGKVKVGKVWKKIDIKKLVKVKPPYKLESIEDGIVLSLEGELFKFDYNVPINYGICPQCARQQSEYYETILQLRGENAIKEALKIIGQRQYRISKYEEKEEGLDLYMVSYREAEKLVKELKQKINGIIKKTFKLHTRDKQTSKDIYRSTILFREVKLKEGQTLIHNGKKYKVLKVSDDYVIVRHGNEIARIPLKKLI

SEQ ID NO: 468 - DNA, 1011 bp, Nanoarcheum equitans
atgaaaaagatgttcgttccattaatggcagcaatgccatttctagcaataggtctagcagcgaatcctgttttgtttaaagccaaagaagtaaaagtagagccccattgtgattttgtagaagaaacaaaaacttatacaataaatggagagaaatatgaggtagaccatgtttgcaaaacaacaaacgaatatgtaacattcacatcggtatggactaacgaagataattgttatttagacgatacccaaggagcagtatgtcaaacagaaaatccaacagaagttagattatacggtttcgtatttgtaacaaaaacagataatggatttaaatgtacagataaaaccggaggaaatgaagcatatggtaaaacagtaagtgaatgtattgccaattacctaaaaggaaacaacaatgtaaatgtagaggtaaaaatagaaaatggaaacactttagtaattgaatataaagctaattatgaaaacccagtagaatttggttacaaagattatttcgtgagatataaccctacaacaaaattcggttatgtattaccagttgttaaagtagaaggcaataccgtatatgtagatccatctgaattccaaacctctaaaaatgctgaaagaatgagagcattattcgaagatgtagcaaatagccaaacaacagtaacacaagaagaaacaaaagaaacaacaacagagacaaccgaaactacagaaacagaaaagaaagaagaaactaaagaagaggaaaccacaacagaagctaaacaaggagaagccacagaagaaaccaaagaacaagccgaaaagacaggagaagaaaaagaaactgaaaaagaaaaaatgggagaaaaagaaaccaaagaaactaaacaagaacaaaccaaacaagaaaccaaacaaggattcccaaccacatacttattagcagctgcagtagtaattgcagcaatagctggagctgtttacttcttcaagcaacaacaacaagagcaataa

SEQ ID NO: 469 - protein, 336 aa, Nanoarcheum equitans
  signal (1)..(20)
MKKMFVPLMAAMPFLAIGLAANPVLFKAKEVKVEPHCDFVEETKTYTINGEKYEVDHVCKTTNEYVTFTSVWTNEDNCYLDDTQGAVCQTENPTEVRLYGFVFVTKTDNGFKCTDKTGGNEAYGKTVSECIANYLKGNNNVNVEVKIENGNTLVIEYKANYENPVEFGYKDYFVRYNPTTKFGYVLPVVKVEGNTVYVDPSEFQTSKNAERMRALFEDVANSQTTVTQEETKETTTETTETTETEKKEETKEEETTTEAKQGEATEETKEQAEKTGEEKETEKEKMGEKETKETKQEQTKQETKQGFPTTYLLAAAVVIAAIAGAVYFFKQQQQEQ

SEQ ID NO: 470 - DNA, 588 bp, Nanoarcheum equitans
ttgattctctattatttaaaactctctatagttatacctttacttctattcctaaactatttaatttctaaatttataggacgatccgtaaaattaataatagattatttgcatattgatgattggcttaaagctaaaaatttaggcaatgctttgtatggaataaaaattgatgaaatcgtaccatttttaactaagctaatagtatttatttttctattgcaatatttatcatgggttaagattaaagagttgcaattattatttatgcttgtctccctctatggaacaataatattttctttgggcctagtattaatagttggtctaatttttggagaaataataaagcaattgatattaaaaaccaacatagatataaaagaaaggcttggagaaaacataaaactatttattgcctctctattcgttgtttcttcaataaatataataagctatttacttgttttcactccatttgaaatagatactagtattgtaaatttggttttctttattctaactctatttttgtttgcgccattattattaagaatagccgtaaaaacctattatggtaggttatga

SEQ ID NO: 471 - protein, 195 aa, Nanoarcheum equitans
MILYYLKLSIVIPLLLFLNYLISKFIGRSVKLIIDYLHIDDWLKAKNLGNALYGIKIDEIVPFLTKLIVFIFLLQYLSWVKIKELQLLFMLVSLYGTIIFSLGLVLIVGLIFGEIIKQLILKTNIDIKERLGENIKLFIASLFVVSSINIISYLLVFTPFEIDTSIVNLVFFILTLFLFAPLLLRIAVKTYYGRL

SEQ ID NO: 472 - DNA, 528 bp, Nanoarcheum equitans
atggtaggttatgagcctgcagaagacacatttttgttattaaaatgggccaaaaaatttgctaaaggcaaaatattagaaatcggagtaggaagcggttacatattagaaaacctattaaaaaagggcttcgatgcttatggagtagaaatagacaaagatgttttaaaatatttaaaagaaaaatttaaagacagggtttggtatagcgatttatttagcaatgtaaatgacaaatacgatctaataatttttaacccgccttatttaccagaagaaggttgggaagatgaaaaaacaaaactatggaccgtaggaggaaaagaaggcaacgaaataatattaaaatttatagaacaattgccattctatttaaaggaggggggaaaagccataataatagtaagctctctatcaaatccaaataaagtgtttgaaaaaataaaagaattaggaatgaaatacgaaatattggaggaaatgtcattgttttttgaaaggctttacgctgttcttatttataaataa

SEQ ID NO: 473 - protein, 175 aa, Nanoarcheum equitans
MVGYEPAEDTFLLLKWAKKFAKGKILEIGVGSGYILENLLKKGFDAYGVEIDKDVLKYLKEKFKDRVWYSDLFSNVNDKYDLIIFNPPYLPEEGWEDEKTKLWTVGGKEGNEIILKFIEQLPFYLKEGGKAIIIVSSLSNPNKVFEKIKELGMKYEILEEMSLFFERLYAVLIYK

SEQ ID NO: 474 - DNA, 2934 bp, Nanoarcheum equitans
atgaaaaagttctttgtaacagcagcgttcccatatgtaaatggttatttacatttgggccatctagtaacatacataaaagcagaaattacagcaagatacaagaaaatgaggggttatgatgttttattcccaatgggcttccatgctactggtgccccaatatatgctgcggcatataaagtatctattggggatcctaaacaaatagaaactttaaagaaaatgggaataaaagacatagaaaaattcaaagacccagcttattgggttgagtatttctctaaagcagcaaaagaggatttatctaaattgggctttatgatagaatgggaaagatcttttaccacagtattcaacaaaccattccataaatttgttgaatggcaataccacaggcttagagagaaaggttatatctatagaggggcacacccaattgtatgggatccaaaagttaatatggttattggcgaccacgataggcccgatgattatgctggaataagaccaatagaaggagtaataattaaattctattcaaaagacttagatgcgtatttgccagcatttacattaagaccagaaacagtttttggagtagtaaacatatgggtaaacccagaaaccgaatatgtattagcaaaggtcaaaaaagtattttatgtatacgaattgtatagtctatacaaaaaatttggaaggctcccattaaatatagaaaatagggacaaactagaaaaactaattcaagactataataatctattagataggctaaagcaatatgaaaaaggtatagatttgatagcccacgctgaagagattgcctataaaccaaaagaagaatttgttaaagaattaaaagaattcgctgaaaaagaaggcattaaaatagaagaaaaagatatagaattactatatgaatattacaatacaaaagtagaaacccaagaagaaaaatggatattacccaatactatagtaatagaagagcttaaaaaccaagattttgaaatagaaataataggtaaaatagataaactaataaaaactctcgcagaaaacccagtaacaaaagaattagtcccagtattgccagcaaaatttgtagacccagaggttggaactggcatagtaatgtctgtcccaagccatgctccttatgattatgttggattattagatttgataaaaaccgaactaaaagaattcgctgagcaagctctaaaaaatgttagacctgtagtaaaagtagaaggctttagtgaaatgcctgctaaagatatagttgaatctatgaatataacatcacaagaggaaagagataaattagaaaaagccacacaaagattatattctaaagaattctaccatggggtattaacagaacacgcccaacaattccaaggcttaccagttaaagaagcgaaaatgaaaatagccgaatatctaatggaaaatggttatggttatatctattatacccttcctgtaaggtttaaatccaggtatggaaacaaagttgtagttaaacttgttaaaggccaatggttcattaaatatagcgataaacaatggaaagaattggcccacaaagctgtggaaaatatgaaattctatcccccacaagtaaaagagctaataaaagaaaaaatagattggtatgatgattgggcctttacccatcaaaaagaattaggtactgccctcccatgggatccaaaatgggttatagaatccctctctgattctacaatatacacagcttattatacaatagcccatatattacaacatccagagaaatataatatagactgggataagctaacgatagatgtatttgattatgtattcctaggaaaaggcgatcctaaagaaatagctaaaaaaactggtataagcgaagaaatattaaaagaaatgagaaaccaatttgaatattggtatcctgtagatataaggtttagcgcccaagatttaatagcaaaccatttggtattctatatattccaccatgtagcaattttcccagaaagtaaatggcccagaggtatagcagtttctggcttcgttacagtaaatggagaaaagatgtctaaaagcaagggcaattttattacaattagagaagctatccaaagatatggtagagacgctgtaaggcttgctgcagcatatgctgggaatgctgaattagttgatcaaaatattgatctagaatttatggagaaagccaaaaacgaaataataccaaggatagaaagctatttagatatggaaggctatgatagagatgaaaatagcttagataaatggatagtcaatagaattagattatacttcaaaaaattggaagaatactatgaaaacataagaccaagagatgttattaacgaattcttcaaattagaaaacgatttcaatttctatagagctttagtattagaaaaaccccataagagggcaatagaatatttcaaaaaagcagtaaaagctttatggcctattattccccatgttgttagagaacctgcatggattggtaaagaagagccagacgaaccatggattagggtaggacaatatgtagaccaagtaataaaagatttggctaatacattaaaattggtaagaattagtatggcaagaaatgttagccataggttagcagatttggttaaactatattacgaaggagcaaagctaacagaagaagaaaaggaagaaataagagaatttatcgaatggaaacctgtcaggataaaaataatatacaaaaacccctcagaatttgatatattgagagacataataccatacatagagaaagtttttggagggaaagtagtattagaattggcttccgaatcaaaagaagaaaaagctaagagagccaaagaatttaaaccagccttcgttatagaataa

SEQ ID NO: 475 - protein, 977 aa, Nanoarcheum equitans
MKKFFVTAAFPYVNGYLHLGHLVTYIKAEITARYKKMRGYDVLFPMGFHATGAPIYAAAYKVSIGDPKQIETLKKMGIKDIEKFKDPAYWVEYFSKAAKEDLSKLGFMIEWERSFTTVFNKPFHKFVEWQYHRLREKGYIYRGAHPIVWDPKVNMVIGDHDRPDDYAGIRPIEGVIIKFYSKDLDAYLPAFTLRPETVFGVVNIWVNPETEYVLAKVKKVFYVYELYSLYKKFGRLPLNIENRDKLEKLIQDYNNLLDRLKQYEKGIDLIAHAEEIAYKPKEEFVKELKEFAEKEGIKIEEKDIELLYEYYNTKVETQEEKWILPNTIVIEELKNQDFEIEIIGKIDKLIKTLAENPVTKELVPVLPAKFVDPEVGTGIVMSVPSHAPYDYVGLLDLIKTELKEFAEQALKNVRPVVKVEGFSEMPAKDIVESMNITSQEERDKLEKATQRLYSKEFYHGVLTEHAQQFQGLPVKEAKMKIAEYLMENGYGYIYYTLPVRFKSRYGNKVVVKLVKGQWFIKYSDKQWKELAHKAVENMKFYPPQVKELIKEKIDWYDDWAFTHQKELGTALPWDPKWVIESLSDSTIYTAYYTIAHILQHPEKYNIDWDKLTIDVFDYVFLGKGDPKEIAKKTGISEEILKEMRNQFEYWYPVDIRFSAQDLIANHLVFYIFHHVAIFPESKWPRGIAVSGFVTVNGEKMSKSKGNFITIREAIQRYGRDAVRLAAAYAGNAELVDQNIDLEFMEKAKNEIIPRIESYLDMEGYDRDENSLDKWIVNRIRLYFKKLEEYYENIRPRDVINEFFKLENDFNFYRALVLEKPHKRAIEYFKKAVKALWPIIPHVVREPAWIGKEEPDEPWIRVGQYVDQVIKDLANTLKLVRISMARNVSHRLADLVKLYYEGAKLTEEEKEEIREFIEWKPVRIKIIYKNPSEFDILRDIIPYIEKVFGGKVVLELASESKEEKAKRAKEFKPAFVIE

SEQ ID NO: 476 - DNA, 1581 bp, Nanoarcheum equitans
atgactaataaggttttttctatactaaaagaatatggtttactcgctggcgataaaaaagttatcgattttttatctcaattggatgaagacgaaattagaaagattctccttaaagtaaagaagaaaaatgtgatggttattaaattggaacacgttaaaatgttcaaagagaccacagaaataacgatagaaaagaaagaaaataaaatctctatatcaaaaaagaacaccacatcgattttacaatttattcaaataaaagaggaatcaaaagagataaaagaaactaaaaaggaagaagaagtagaaataattcatactactaaaaaacccgaagatgtcgatacctctatagagataataaaacctatagaagctaaggcaaaaaaatggacagtccaagattttgttaatttctataaaaacaaattagatttctataaaagattattaaaaggaaggttaaacccaataagcattagaaatgttttaaatctaaaagaaaatacagaagtctctataatagggagggtattcgaaatagtgaaaagggataactacgcttctttagttttagaggatacaactggaagagtaatagtaaaattatttcctgatactccagcatgggaaaaactaaaaatgatggtaccagatgatatagtaggagtgcaaggcatagttggtaaaaacgcctctataatagctaaagatattatttatccggacataccaacaaaacaaataaaaagggcaaatgatgatgtttacgctttgtttattacagatatacatgtaggttccaaatatttcttggaaaaccatttcaagaaattcttggattggctaaacctaaagaaaggcgatatagaaatagcgaaaaaagttaaatatctaataataactggcgatttggttgatggggttggtatctatccagagcaagaaaaagaattagttataacagacatagaagagcaatatgaatatttcgccaaactattaaccgaatatttaaatagagatgatataaaagtaatattaattcccggtaaccacgatgccgttagattggaagaaccccaacccccgataccaagagatatagctaaatccctatatagagaaggtttctatttattacctaatccaagttgggttagaatacataaaaaagatgatttcgaaggtttcgatttattgttataccatggttacgctttcgattggattatatccaataccgaagcagtaatggatggttatttacatccagaaaaagtaatgcaattgttattagtaaaaaggcaactattttcaggccatggctctagcccatatgtaccccaattgcccgatccatttttgatagatatagtaccagatatatttgttacgggccatatacatagagttgggttaggagaatacaaaggcactatattattaaatgctggttgttggcaggaaacaacaccattccaaaaaaaggtgggccatgtcccagatcctggtaaggcgatagcgataaacctaaaaactagggacaaaactatattaaagttctatgaaaactaa

SEQ ID NO: 477 - protein, 526 aa, Nanoarcheum equitans
MTNKVFSILKEYGLLAGDKKVIDFLSQLDEDEIRKILLKVKKKNVMVIKLEHVKMFKETTEITIEKKENKISISKKNTTSILQFIQIKEESKEIKETKKEEEVEIIHTTKKPEDVDTSIEIIKPIEAKAKKWTVQDFVNFYKNKLDFYKRLLKGRLNPISIRNVLNLKENTEVSIIGRVFEIVKRDNYASLVLEDTTGRVIVKLFPDTPAWEKLKMMVPDDIVGVQGIVGKNASIIAKDIIYPDIPTKQIKRANDDVYALFITDIHVGSKYFLENHFKKFLDWLNLKKGDIEIAKKVKYLIITGDLVDGVGIYPEQEKELVITDIEEQYEYFAKLLTEYLNRDDIKVILIPGNHDAVRLEEPQPPIPRDIAKSLYREGFYLLPNPSWVRIHKKDDFEGFDLLLYHGYAFDWIISNTEAVMDGYLHPEKVMQLLLVKRQLFSGHGSSPYVPQLPDPFLIDIVPDIFVTGHIHRVGLGEYKGTILLNAGCWQETTPFQKKVGHVPDPGKAIAINLKTRDKTILKFYEN

SEQ ID NO: 478 - DNA, 579 bp, Nanoarcheum equitans
atgcgtattcctataataaaatatgaaatacctattccagaaaatgtaaaggtttcttacgaaaataacatattaaaagtttctggcccaaaaggagaagtagaaaggaagttctaccacccattaataaagctttctgttaatgacaataaaataattttagagacatactttgcaacaagaagggaaaaaagactaataaatacatggagatcgcatattaaaaatatgttagaaggagtacaaaacccatttgtttataggttaaaagtatgttatacccatttccctatgagagtaaagttagaaggcaataaactaattgttgaaaacttcttaggagaaaaggccccaattataaaagagttaccttatttagataaggtaaaagtaaaaatagagcaaaacaaagatgaaaccgaaatagtagtggaaagccctgataaagagaaagccggtatcgtcgcttctatgatagaacaatctacaaggttcttacataaaaggaaagatagaagaaggtttactgatggtatttggctatactataaagccggtaaaaatatattagaagagtaa

SEQ ID NO: 479 - protein, 192 aa, Nanoarcheum equitans
MRIPIIKYEIPIPENVKVSYENNILKVSGPKGEVERKFYHPLIKLSVNDNKIILETYFATRREKRLINTWRSHIKNMLEGVQNPFVYRLKVCYTHFPMRVKLEGNKLIVENFLGEKAPIIKELPYLDKVKVKIEQNKDETEIVVESPDKEKAGIVASMIEQSTRFLHKRKDRRRFTDGIWLYYKAGKNILEE

SEQ ID NO: 480 - DNA, 597 bp, Nanoarcheum equitans
atgaagatgaagctattcggaagatgggattatgaagatgttactgtagaggatcctggactaagagattatataaatctaaaacccatgttaataccatatagcggaggaaggcatcaaaaacatagatttggcaaagcaaaaataccaataatagaaagattagctggaaggttaatgacttctggccatttagggaaaaaacataaatggactagcgaacaccaaacaggtaaaaaatataatgcttacaaaataataataagaactttcgagattattgaaaaaaggactaaacaaaacccattaaaggtttttgtaaaagcaatagaaaatgctgctccaagggaagaaactactactatagaatatggtggtgctagatatccaaaagctgttgattgttctcctcaaaggagggttgatttggctattagacatatggtttggggagcgttccatggctctaggaaaaagccaatatcaatagaagaagcattggcggaagaaataattaacgcatataacaattctctaaaaagctacgcaataaaaagaaaactcgaaatagagaaaaccgcagaatccgctaggtaa

SEQ ID NO: 481 - protein, 198 aa, Nanoarcheum equitans
MKMKLFGRWDYEDVTVEDPGLRDYINLKPMLIPYSGGRHQKHRFGKAKIPIIERLAGRLMTSGHLGKKHKWTSEHQTGKKYNAYKIIIRTFEIIEKRTKQNPLKVFVKAIENAAPREETTTIEYGGARYPKAVDCSPQRRVDLAIRHMVWGAFHGSRKKPISIEEALAEEIINAYNNSLKSYAIKRKLEIEKTAESAR

SEQ ID NO: 482 - DNA, 663 bp, Nanoarcheum equitans
atgtatgaactaattttttccccccaatatataaacaaagacaaaaaaatattaatccccctaggttttttcttcgttatactctcttatataatacaaacctatttagacattgatttatttcgatcgagagttagcctatattttattctaacattattaatatctcaaattacgacaaaactatttgaaatgttcgaattcgaggaggaaataaaagaattaaaaataagagattttttagaaatctacatattgctttcgataggtatattattgggctttttagttataccgcaaaatttctctattagcttctctcctacgggtatagagtatatattagttaataacttaaaattagcatacacattttttgttttgtcttttttgtttgggatcggtagcgaattcttattagcgtataatttagatattctggcttatgcaataaaacaaaaaccaatactattaccattagcaatgctagaatttgcaggctttttgttgttttcgctagcagggggtatattgtctataagtattataaggaatagtctaaataaatatattttaatcgatatagcgaaaatactattattcggaacagccattttaattacttcctatataatcgagctttcaatgatatactttttataa

SEQ ID NO: 483 - protein, 220 aa, Nanoarcheum equitans
MYELIFSPQYINKDKKILIPLGFFFVILSYIIQTYLDIDLFRSRVSLYFILTLLISQITTKLFEMFEFEEEIKELKIRDFLEIYILLSIGILLGFLVIPQNFSISFSPTGIEYILVNNLKLAYTFFVLSFLFGIGSEFLLAYNLDILAYAIKQKPILLPLAMLEFAGFLLFSLAGGILSISIIRNSLNKYILIDIAKILLFGTAILITSYIIELSMIYFL

SEQ ID NO: 484 - DNA, 813 bp, Nanoarcheum equitans
atgaaagttggtttagagatacatcaacaattagatactaaaaaattgttttgcgaatgtgaatcaaagcttagtgacaatgttagatttaaagtaaaaagatatttacaccctgtagcaggggaatctggagaatatgatatagctactctattcgaaaaagctaagaacaaatactatatttacgaagttacagacaattcttgtttagttgaattggatgaagagcccccccatttagtaaacgaagaagcaattaagatcgctttagatgttgcagaatctctaaatatgaaggtaataccaataatacaagttatgaggaaaaccgtaatagatggttcaaacactactggtttccagagaactatgctaatagccatagatggttatttagagattaaaggtaaaaaaattagaatacaatctttatgcttagaagaagacgcagcaagaaaaatagaagaaaccgataaatatgtggtttataggttagaccgcttagggatccccttattggaaataacaacttacccagatatagatgatcctgaattggctaaaaaagtagcagaaagaataggcctaatattaagactaacagggaaagtaaaaaggggtttaggcacagtgagacaagacctaaatgtttctatagagggaggagaaaaaatagaaataaaaggagtacaaaatttaagagatattcctaaaataatagagctagaagtaaaaagacagcaagacttaaaaaaatggcaagaagaagttaaaaaaagaggtatagatggtttcgaattagtagagctttag

SEQ ID NO: 485 - protein, 270 aa, Nanoarcheum equitans
MKVGLEIHQQLDTKKLFCECESKLSDNVRFKVKRYLHPVAGESGEYDIATLFEKAKNKYYIYEVTDNSCLVELDEEPPHLVNEEAIKIALDVAESLNMKVIPIIQVMRKTVIDGSNTTGFQRTMLIAIDGYLEIKGKKIRIQSLCLEEDAARKIEETDKYVVYRLDRLGIPLLEITTYPDIDDPELAKKVAERIGLILRLTGKVKRGLGTVRQDLNVSIEGGEKIEIKGVQNLRDIPKIIELEVKRQQDLKKWQEEVKKRGIDGFELVEL

SEQ ID NO: 486 - DNA, 348 bp, Nanoarcheum equitans
atggttaagcaagtaatagtttgtagaaaattagatataggaaaaggcaaactttgcgcccaagttgctcatgcttctttagatgcagcactaaaggtttatagaaataataaagagctattcgatagatggtatagagaaggagcaaagaaagtagttctaaaagtaaatagcttagaagaattattagacatagcgaaaaaagcaatggaaaaaggcatagttgtttctataataagagatgcaggcaaaacccaagttagtccaggcacaataatttgtattgctttaggccctgacgaagatgaaaagatagaccaaataactggcaacctaaagctctactaa

SEQ ID NO: 487 - protein, 115 aa, Nanoarcheum equitans
MVKQVIVCRKLDIGKGKLCAQVAHASLDAALKVYRNNKELFDRWYREGAKKVVLKVNSLEELLDIAKKAMEKGIVVSIIRDAGKTQVSPGTIICIALGPDEDEKIDQITGNLKLY

SEQ ID NO: 488 - DNA, 651 bp, Nanoarcheum equitans
atgaggagagcgcttgagagcgtaaattatttaattttattagccttatccctttttattgctttgtttgttgctaaaaatacaatttttcaatcgataaaagctatttctttagcttcagaggaaaccacaatttctgctataaagaatctaaaatgtagtgttaacccaatagatgtgaaagaattggccaaagagtttgtaaacaaagagttaaataaattaaagtttttagatttggaattagatgattatactttaagcgatataaaattggcttgcctaaaaaagtatggttctttagaatgtaatattttggaaaaatatatagaatacgattgttataaggcttttctatattatatggccaattttggtaatttaaatagcgctttagcttgtttttatattatttacggcccccaatataaaaaccaaatagcttgttgtactccaagtatggaaaaacccgaaatatataaaaaattggaggaatgttctttaattgatagttcttttacttattgtggtaaaaaagaggtaaaatccattatagcttataataagacctttttgatagaatatagagaaaactgtgaaatcgccaagaacttggataactatttattagcggtatggttaagcaagtaa

SEQ ID NO: 489 - protein, 216 aa, Nanoarcheum equitans
  signal (1)..(25)
MRRALESVNYLILLALSLFIALFVAKNTIFQSIKAISLASEETTISAIKNLKCSVNPIDVKELAKEFVNKELNKLKFLDLELDDYTLSDIKLACLKKYGSLECNILEKYIEYDCYKAFLYYMANFGNLNSALACFYIIYGPQYKNQIACCTPSMEKPEIYKKLEECSLIDSSFTYCGKKEVKSIIAYNKTFLIEYRENCEIAKNLDNYLLAVWLSK

SEQ ID NO: 490 - DNA, 543 bp, Nanoarcheum equitans
atgtggagacaaagaagaaaatgggaagggccttctcatccatggcaaaagcaaagactaataattgaaaaaagattaatgaaagaatatgggttaaaaaataagagagaattatggattgctgaaacaattgctagaaaatggcgtgcttatgctagatacctaaacgctaaacaagcggcaggccaagacattagcgaagaaaaagaaagatttttgactaagcttaagaaattgggagtattaagcgaaaatgccgaattagatgatgttttggatttgactgttaaagatgttttagaaagaaggctacaaaccatgttagtaaggaaaggcttagctaaaacaatgaaacaagcgaggcaatttatagtacatggccatataatggttaacggcgaagtagtagatgctccatcttatttggttaaaaaagaggaagaagacaaaattgagtttgtgcctttttctccattagctaatccagaacatccagctagaaaactagaacaaaaagaggaaactaatgaggagagcgcttga

SEQ ID NO: 491 - protein, 180 aa, Nanoarcheum equitans
MWRQRRKWEGPSHPWQKQRLIIEKRLMKEYGLKNKRELWIAETIARKWRAYARYLNAKQAAGQDISEEKERFLTKLKKLGVLSENAELDDVLDLTVKDVLERRLQTMLVRKGLAKTMKQARQFIVHGHIMVNGEVVDAPSYLVKKEEEDKIEFVPFSPLANPEHPARKLEQKEETNEESA

SEQ ID NO: 492 - DNA, 702 bp, Nanoarcheum equitans
atgcgttttgatgggagagactataatgaaataagagatactgaaatgaaaataggagtaatctctaaagcggatggtagcgcatattgtaggactggcaatactattgctatcgcagcagtatatttaaaacctggtagagaacaatccaatttaaaagtaagctataggatgcttcctttcgctggagaagaaaggaaaggcctaggtttaacaagaagagaaatagaacttagctatataatagctaaagctttagagccagcaattatatttgaagaaataccctatttaacaatcgaagcttctgtagaaataattaaagctgatgccggaacaagagtagcagcgataaatgctttgtccttagctttagcccatgcaggaattcctatgaaagctttggttggagccatagcagtaggaaaggttggagaaaaaatagtattagatttgaacaaacaagaagaagactatgattctgaaataataaaaaaggaattgccccaatattacgaatactatggagaaggaaaagctgtcgatatacctatggcaatgtataagaacaaaattacattattgcaattggatggttctatagatagaaaatccttattagaagcaatcaaattaggcaaggatggtataaagagaatgattgatttacaaaaaatagctatagaggattattatttttaa

SEQ ID NO: 493 - protein, 233 aa, Nanoarcheum equitans
MRFDGRDYNEIRDTEMKIGVISKADGSAYCRTGNTIAIAAVYLKPGREQSNLKVSYRMLPFAGEERKGLGLTRREIELSYIIAKALEPAIIFEEIPYLTIEASVEIIKADAGTRVAAINALSLALAHAGIPMKALVGAIAVGKVGEKIVLDLNKQEEDYDSEIIKKELPQYYEYYGEGKAVDIPMAMYKNKITLLQLDGSIDRKSLLEAIKLGKDGIKRMIDLQKIAIEDYYF

SEQ ID NO: 494 - DNA, 537 bp, Nanoarcheum equitans
gtgtttgctgtaacatttttctttttaagcattacgatgcgagcgttattgggtaaagacaaagaaaaattagcaagaaaatacgctggtttagtatctttcgtttttgctttctttatcttataccatttaagaagtcctgaaagctttaatgtggttatgtcttttctaaatgttttcggattaagcttttatattttgttggctatgtttttctctttcttggtaattagtagcatagtacgcaaagaagaaataaaaatgccggctttcattggaattatttcctttataattctaatatacatcgcatggattaatttcccaacaatgcagaaaggaccgaccgaatttaaaattgacgaaaatatattggctttcttagcagtaatattaccaattggaataatggtcggtttgttatacttagctacaaggcctgttcccgatacaagtcaacaacaacagcaacaacctgatataaagaagaagatgtttgatgtattaaagaagcttcttgaaatagaggaaaaataa

SEQ ID NO: 495 - protein, 178 aa, Nanoarcheum equitans
MFAVTFFFLSITMRALLGKDKEKLARKYAGLVSFVFAFFILYHLRSPESFNVVMSFLNVFGLSFYILLAMFFSFLVISSIVRKEEIKMPAFIGIISFIILIYIAWINFPTMQKGPTEFKIDENILAFLAVILPIGIMVGLLYLATRPVPDTSQQQQQQPDIKKKMFDVLKKLLEIEEK

SEQ ID NO: 496 - DNA, 513 bp, Nanoarcheum equitans
gtggcagtaaaatacgatgcactcgatactattaaattgttagacacgattggattttttgatgttattgtacccttcattttagcggttataattacttatatgtttttagatattacttatcccagtctagaacaaaaagtaaaaagagttatagcctttgcggttggttttatttttgtttctagcaaatctttagtattaaggttattcaacatcggacccaaaattatatatttgttagttgttctgttcttcggtattgttatattagagatttcgaaagtttatcaaactatgcaaaaaatagatgtagacgataaatggaaagaaatatttgaatgggtaaaactaggatttatcactattatagctttagttattttcgccatcttttttattgggggaggggaacaaacatcattcaaaatagatgaaaatatattagcatttctagcagttttactaccaataggtgtcatggtaggtatattatatattgcgacaaaataa

SEQ ID NO: 497 - protein, 170 aa, Nanoarcheum equitans
MAVKYDALDTIKLLDTIGFFDVIVPFILAVIITYMFLDITYPSLEQKVKRVIAFAVGFIFVSSKSLVLRLFNIGPKIIYLLVVLFFGIVILEISKVYQTMQKIDVDDKWKEIFEWVKLGFITIIALVIFAIFFIGGGEQTSFKIDENILAFLAVLLPIGVMVGILYIATK

SEQ ID NO: 498 - DNA, 2256 bp, Nanoarcheum equitans
atgccgtataatcctaaagaaatagaacaatggtataaagagaattacaaatatttttttggagagggggacaaaatattaattattgatactcccccaccttacccagcaccattatggcatataggagcggctttaagttatgctttacaagattttattgcgaggggttttagaaaattgggttataaagtaatatttcctgaaggctttgatgggaatggtataccaatagagatgtatttagaaaaatacgaaaaaatacccttcggctctatagatagagaagaatatataaaaaaatgtagacaaattctagatagttggagagaaaaaatggacaaaatcctaaaagatctattattatctatggattttgagcatagatacaatacagacgatcctgaatatagggctctaactcaaaaaactttcgcagagttatgggagaaaggtttaatatatgaagcggaatatccgataaactattgtccccattgtaaaacagcaattgccgatgcagagatagaaagaaaaatcaaaaaaactaagctagtttatattaaatttaaaataaaagatagcgatgattatattactgtagcaactacgagacccgaattgctaggagcatgtaaagctattattgtacatcccgatgatgaaagatacaaaaaataccataacaaaatagcaattgttccttattacaatagagagatcccgattatacctcataaaatggcagatccaaattttggaactggcgcagtaatgatttgttcctatggagattgggttgatgtccaaatatttagggaattgcaactaaaaccagaaaaaataatagacgaaaatggtaggctaaccatagagcctgttaaggggcttactactaaagaaggcagagaaaaaatgattgaagtattaaaacaattaggagtggtggaaaaaatagaggaaatagagcattctgttccagtccatgaaaggtgtgaaacagaaatagagattattccaatgaaagagttttatttaaagcaattgccattcaaagaggaaataaaaaaattatctaaagagatagaatttattcctgaaaggtataggaaaaacttagagaattggatagattctattacaatagattggcccatctctagaagaagatggtatgcaacagaaattccattatggtattgtcccaaatgtggttatatacatgtagcaaaggatggtaaataccatcaaccttggaaagaagaaatggtttgccccagatgtaatacaaaaatggtcggagaaacaagagtactagatacttggatggattcctctattacaatctattatttaattaaaaaatatagcaaaatactaggaattgatgaagagggattatttaacaattacactttaagaccccaaggctacgaaataattaggacttggctatactatactttattaagagtataccaactaactggcaaaaaagcgttcgattttgttgtaatcaatgggatgggcttagataaacatggtagaaaaatgagtaaaagatatggcaatgtcatagaaccagaaacattgttggaaaaatatggagcagatacattaagatattggtttgcaatggaaatctctattggagaagactatagaattaatgaacaaaagatagctggaataatgaagtttatgaataaggtatggaacatagctaattacatatcgcaataccaatatagagaaacccaaaacttaaagcctacagatgaatggataataaactatgtaaaatatttggaaaacaaagctatagaatatataagaaatttcgagtttaataaattggcaagagagttgtatagatttgtatgggatgtatttgccaaccattatatagagctaaccaagaaaagggccaaaaataatgacgatagcgctatatatgcgttgtattttgttttcgagagagtattaaatatgctatctatattttctccaggaatagctaaatatttagctaaaaaactatataataaagatatagaaaaggaaaaactaaaatactggggcaaagttagattagatctattatacaaaggagaaaaattaatagagtttaacaattatgtatggaaactaaagacttcccaagggaaaaaactaaaagacccaatatctatagaaatacccaaagaattagagattttcaaagaggatttgatattattgcacaacatacagtag

SEQ ID NO: 499 - protein, 751 aa, Nanoarcheum equitans
MPYNPKEIEQWYKENYKYFFGEGDKILIIDTPPPYPAPLWHIGAALSYALQDFIARGFRKLGYKVIFPEGFDGNGIPIEMYLEKYEKIPFGSIDREEYIKKCRQILDSWREKMDKILKDLLLSMDFEHRYNTDDPEYRALTQKTFAELWEKGLIYEAEYPINYCPHCKTAIADAEIERKIKKTKLVYIKFKIKDSDDYITVATTRPELLGACKAIIVHPDDERYKKYHNKIAIVPYYNREIPIIPHKMADPNFGTGAVMICSYGDWVDVQIFRELQLKPEKIIDENGRLTIEPVKGLTTKEGREKMIEVLKQLGVVEKIEEIEHSVPVHERCETEIEIIPMKEFYLKQLPFKEEIKKLSKEIEFIPERYRKNLENWIDSITIDWPISRRRWYATEIPLWYCPKCGYIHVAKDGKYHQPWKEEMVCPRCNTKMVGETRVLDTWMDSSITIYYLIKKYSKILGIDEEGLFNNYTLRPQGYEIIRTWLYYTLLRVYQLTGKKAFDFVVINGMGLDKHGRKMSKRYGNVIEPETLLEKYGADTLRYWFAMEISIGEDYRINEQKIAGIMKFMNKVWNIANYISQYQYRETQNLKPTDEWIINYVKYLENKAIEYIRNFEFNKLARELYRFVWDVFANHYIELTKKRAKNNDDSAIYALYFVFERVLNMLSIFSPGIAKYLAKKLYNKDIEKEKLKYWGKVRLDLLYKGEKLIEFNNYVWKLKTSQGKKLKDPISIEIPKELEIFKEDLILLHNIQ

SEQ ID NO: 500 - DNA, 990 bp, Nanoarcheum equitans
atgatattgcttttattattaccattagctttgtccgcagtagtttatactaatacccttaacactccttacgggagtttaaactatactatagtcaatggtagcacaatagatttggatggtcaattcgctgtggtagaaactattaatgaaccaactggtttatggtttagactaaattgctctaatggcgatacaaattgtgaaaccgaagtacaaaagaaatataggcttttactaaaattagataacaacccatataattttagcttaaaccaaagctgtttaactccaatagtctttatagagaatacaacatcatataatagtaaagtttttattactaaaccagagcaaggaatatattatgctatatgccccaaaagatatttagatagagttgttgccacaaagagttgtgggtactatatgccattatttactttttgggacataactaatagcactcgcatatcattagaaagtgtaataaacaatagctatgaagaatatccattcgttttttgcgtatacccagcaaaagaccaactaatatttattcccacaacagaagtagttcttacaactttatatccttttgccgatataaatataatactaaaaaatttcgattccaaacccgtaaatgttacccttacatataatacagaccaaaacgctctaaacgcctcttattttatatacaacaataccgcatctaatatagttaatctaactttacctgccgcagaggaagaacctggaaaagtatccattatatttagggtatcctctatagaagcagtaaatggcacaatatatttcaaactttacaaagagaacaacactttagttgatactaaagtattaagagtaaaagtaattactacagagggcaaataccaaaaagctggtgcagaaattaatttagggttatttttatttattatttacttgatatccagagcgctaagaccaaaaatattataa

SEQ ID NO: 501 - protein, 329 aa, Nanoarcheum equitans
  signal (1)..(19)
MILLLLLPLALSAVVYTNTLNTPYGSLNYTIVNGSTIDLDGQFAVVETINEPTGLWFRLNCSNGDTNCETEVQKKYRLLLKLDNNPYNFSLNQSCLTPIVFIENTTSYNSKVFITKPEQGIYYAICPKRYLDRVVATKSCGYYMPLFTFWDITNSTRISLESVINNSYEEYPFVFCVYPAKDQLIFIPTTEVVLTTLYPFADINIILKNFDSKPVNVTLTYNTDQNALNASYFIYNNTASNIVNLTLPAAEEEPGKVSIIFRVSSIEAVNGTIYFKLYKENNTLVDTKVLRVKVITTEGKYQKAGAEINLGLFLFIIYLISRALRPKIL

SEQ ID NO: 502 - DNA, 465 bp, Nanoarcheum equitans
atggcatatagcgagttaatagaaatacgcaatgtcttagagcatactggttactatgattttatttattcttttactttgctatttttgatttattattatgctctttctactttaaatttgttaacaaaaagagataatattttgttttcttttatgtttgcagcattgtctttatattatatagatgtgcattttttggctaagaatttgctttatatagtattcctaataattggtttctatttgtttaaagccccattaatacaaaccccaaaaggtttagaaaaattaacacaaaaagatttggaaaaaatagaagaaccaaagaacaaaccaaaattatttggctattttattgtatcggcaataatgtatatgtttttatctcctattctggggataccaattactattgttcttataatatttttggtcttagcgctctggatatcaagtaaataa

SEQ ID NO: 503 - protein, 154 aa, Nanoarcheum equitans
MAYSELIEIRNVLEHTGYYDFIYSFTLLFLIYYYALSTLNLLTKRDNILFSFMFAALSLYYIDVHFLAKNLLYIVFLIIGFYLFKAPLIQTPKGLEKLTQKDLEKIEEPKNKPKLFGYFIVSAIMYMFLSPILGIPITIVLIIFLVLALWISSK

SEQ ID NO: 504 - DNA, 2361 bp, Nanoarcheum equitans
gtggttatagttaaaaaagtaatactaaacaatgtaaaaacccactctaaaagggaattcgattttgaaaaaggcataaacctaatactaggcccaaatggatcgggtaaaaccacattagtcgaatctatatttttagctctatttggaggagatttcgcgagagttatagactattttaaaaaaggagaaaaaactatggctataactttaatattagaggacaaaggcaaaacctatagaataagaaggaaatgggtattagagaataatgctaaattagtagaaagctcgctagaattaattgatactattcctaaaaaattggctagtgatcataataaattgttacaacaaataaaacatttatttggcttagataagaaaataatcccattaatatattataagcaaaatgaaataactaaaataattgaaatggatccgagaaagagaaaagagtggtttgatgaaattctaggaataaaggatttggaagaattctcagaaaaactaaaaatggcaataaaattaataaaaaccgggaaaatttcaagaatagaagataggataaaactattaaaagcagaattaaataaaaaatccttattagagaacaagcttaaaaactataaagaaaaactggttttgctaagcaacgaattagagaatttagaaaaagaatataaaatattggaaaaccagtataaggaatatttagaattgaaagctaaactaaaatctattgaagggcaaataaataacataaatgttaaagaaatagaaagtaaaatcaataatattagagaagaattaaacaatatagaagagctaaccgattatgaaaaagacatactttcaaaaaagcatgaaataattagatgtaacgagataaaaaatagactaaaagagttggaaaaagaaataaaagattacgataaaataaaaaaggaatttttagagatagagtctaaatacaaacaatacgaagagaaaagactagaatatgaaaaagctaagatgttagaaaaggaaaaggaaaaagctaaaagagaatattcttatttactaaaagagaaggaaagtctggaaaaagagattgctgaattacaaaacaaaataaaccaaataaaggaattagaaaagatggaacaagaactattggaaatacaagaaaggattggtgttattaaggctaaactaaaattattagaaaatataaaagataggtgcccattgtgtggggctaaactttctagtgatactattgaacatttgcaaaaagaaagagaaaaattacaaaaggaatactattatttaaaagaaaagtacaaccaattgttaataaaaattagagctttagaaaaatacaaaggattggaaaaagtattagaagcaaaaaccaaacatttagaaactatagaaaataggctaaaagagataaaacctattatagaattggaaatcccaaaaattgaattagacgaatccatcccttacaaatataaacagttattaaataaagtttcttatttagaagcaaaaataaaggaatatgagagatataaaaatatagaatgcccttacgatatagctatcgaagagctaaaaaggatagaagacaaatacaataaatacataaaaaagcctgccttagagagagaactaaaccttttgttaaaagaattagagagatacaatagtttgctaaaagagaaagaagagattttaagtaaattaaacccagaaatagaaacgaaatataaagaattaactaaaaagaaagaaaaccttctatcagagatttccaaagttaaaggcataattaaagagatcgaatcccaaataaaagagatcgaaaagcatgaaagtactattaaacaattagaagagaagaagagaaaatgggaaaaactagttgaaaaactaaatagaatagtgaaagctttaggcagagacggtattcctaaagctctaagagaaggagccataaactatataaatgatatggccaatatttatcttagagagtttaccgacaaatataaactgaaagtgaataacgatttatcaatatatgctatccctatagataatccccattatgagatagaggctaaaaaccttagtgggggagaaaaggttgtgttttctttatctatcgctttagctataattagttggctatcccttcaaaacatgtttatggttttagacgagccaactgcaaatttagacaatgaaagaacattggcattaagaaaaacctttgataaactagaaaaaatggttgaacaagctataatagttacacacaacgaattattagatactggggaaaaccatgttgttagattataa

SEQ ID NO: 505 - protein, 786 aa, Nanoarcheum equitans
MVIVKKVILNNVKTHSKREFDFEKGINLILGPNGSGKTTLVESIFLALFGGDFARVIDYFKKGEKTMAITLILEDKGKTYRIRRKWVLENNAKLVESSLELIDTIPKKLASDHNKLLQQIKHLFGLDKKIIPLIYYKQNEITKIIEMDPRKRKEWFDEILGIKDLEEFSEKLKMAIKLIKTGKISRIEDRIKLLKAELNKKSLLENKLKNYKEKLVLLSNELENLEKEYKILENQYKEYLELKAKLKSIEGQINNINVKEIESKINNIREELNNIEELTDYEKDILSKKHEIIRCNEIKNRLKELEKEIKDYDKIKKEFLEIESKYKQYEEKRLEYEKAKMLEKEKEKAKREYSYLLKEKESLEKEIAELQNKINQIKELEKMEQELLEIQERIGVIKAKLKLLENIKDRCPLCGAKLSSDTIEHLQKEREKLQKEYYYLKEKYNQLLIKIRALEKYKGLEKVLEAKTKHLETIENRLKEIKPIIELEIPKIELDESIPYKYKQLLNKVSYLEAKIKEYERYKNIECPYDIAIEELKRIEDKYNKYIKKPALERELNLLLKELERYNSLLKEKEEILSKLNPEIETKYKELTKKKENLLSEISKVKGIIKEIESQIKEIEKHESTIKQLEEKKRKWEKLVEKLNRIVKALGRDGIPKALREGAINYINDMANIYLREFTDKYKLKVNNDLSIYAIPIDNPHYEIEAKNLSGGEKVVFSLSIALAIISWLSLQNMFMVLDEPTANLDNERTLALRKTFDKLEKMVEQAIIVTHNELLDTGENHVVRL

SEQ ID NO: 506 - DNA, 549 bp, Nanoarcheum equitans
atgactctaaatatgaagaacttaagaaagaaggtttggctatttagtttaattctattaggtatagttttagtatttttatctaaagataattgcatacattataaagagtataagttttgcccctctaaagggggatacgatgtttattacaataataaatactatttttctatctattacccattaaccgaattggattgtcccaacataaatattgatagaaactttttcaagggggagatacacataaattttaaccctaatctaaaaggggcttttactattgtggcaagcgatttagctataaagatggcgcaagttttagcttataatgatataccattagaaaatctaaaattctattgcctagaaaaatgcgagaaatttccaacagaaaaaatagattgtaacaaaactattcatataattatagataagggttctcccacattaaagagggaaaacaaatgtatatatattttaggaaatgagagtactataaaaaaagtatactcttgcttcgtttataacatctttataatctaa

SEQ ID NO: 507 - protein, 182 aa, Nanoarcheum equitans
  signal (1)..(28)
MTLNMKNLRKKVWLFSLILLGIVLVFLSKDNCIHYKEYKFCPSKGGYDVYYNNKYYFSIYYPLTELDCPNINIDRNFFKGEIHINFNPNLKGAFTIVASDLAIKMAQVLAYNDIPLENLKFYCLEKCEKFPTEKIDCNKTIHIIIDKGSPTLKRENKCIYILGNESTIKKVYSCFVYNIFII

SEQ ID NO: 508 - DNA, 423 bp, Nanoarcheum equitans
atgcttaaaataagaaattataatccttctgattggtctcctagctgggttaggtctaaacaacccagaaagcaaaggaaatacataattaatgccccattgcatagaagaagaaagatgatgcgttctccattgtctaaagaattaagggaaaagctcggaataagaaatgttcctattaaagttggagatgttgttagagtagaaagaggtaactttagaggaaaggaaggccaagtaatcgatatagatcctaaatattatagggtttatttaagcttagatactgataggcaataccctttccatccctctaagttaacaataataaaattagatttatctgataaaaaaagaagggaagccttaaaaattgatgactctaaatatgaagaacttaagaaagaaggtttggctatttag

SEQ ID NO: 509 - protein, 140 aa, Nanoarcheum equitans
MLKIRNYNPSDWSPSWVRSKQPRKQRKYIINAPLHRRRKMMRSPLSKELREKLGIRNVPIKVGDVVRVERGNFRGKEGQVIDIDPKYYRVYLSLDTDRQYPFHPSKLTIIKLDLSDKKRREALKIDDSKYEELKKEGLAI

SEQ ID NO: 510 - DNA, 258 bp, Nanoarcheum equitans
atgttaatggaaaggtatatgagagttagccaagcttatgataaacaagtttatactgaagatggcatttatttgggaaaagttgaagaagcactaatacaagacaattccagaatatatgggtggcaagttagattagaaaacccaaaaataaaagaagctttaaggggtaagggtataattgtaccccatactttagtaagggccataggcgatataatgattattgcgagagtttctattaaaaaggaagaataa

SEQ ID NO: 511 - protein, 85 aa, Nanoarcheum equitans
MLMERYMRVSQAYDKQVYTEDGIYLGKVEEALIQDNSRIYGWQVRLENPKIKEALRGKGIIVPHTLVRAIGDIMIIARVSIKKEE

SEQ ID NO: 512 - DNA, 2061 bp, Nanoarcheum equitans
atgagatggttgtccctattgctaatacctatagctttgtctttggttattgaaaataatagttgtctaaaaaatggtaaccatactatttatgtcaaatccaaatatttcgatgaaaaaatgaatattagtattggtgataaagagtttagctgcataagatcaaaaatagaagaaaattatgttctatacaaatgtaatataaatataaatttaagcgatgggttgtatgatcttaaaactcccttagagagttatactatatgtatcgataatcaacctcctacaatagaaatagggggccaatacataaatgtttctaataattattgtttctatgatttcaatccaaatataaatgttaaagacaatggttgctgtgagaaaacagatttgtatatctattataatggagagctcgtaaaagaaataaccaaacctggtttctatataataaaagcttctgacaaagctggcaatacaatagagcaaaaactaaacatttgttttccagaaactaataagccaacaataaaattaattgattataaagttggcacaaacataaacgcgacattttatgttaaagacgatagcttaataaaagaggttagctattgtaatattaatccaataaaagagggttatataaattgtagtttaccaaaacaagaaactgtaactatgactgtaacagatatttacaataatagttatagcgaaaccttcgttttcgatattgaaccccccacaataaaaataatagacccaattccaatagataatactatatacctaaacgcttctaaattggaagtaagtttattggtttcgcccgatactaaaaaatgttggttaggcaatcaagaattgcctatagtaaataacattgtaaaagcaatgtttagcgatagcggcgattatactattgtttgtgaagatgaaaaaggaaacaaagctcaaaaaactttacatgttatagttgatacaattcccccagaattaaacataatagattatggctataatgttgatgacaaaggagtttacgcatatattagatatacaataagccccgatgcgtatgtaaaagtatataaaaatggagtatacttacaaaactcttatagtggtataataaaggattataatgtttttgttgggcaaaaatatgtttatactttagagccaatagattatgctaacaacaaaggagaatcaaaagaagtagttatttatataaaaagcgataaaaaatgtaaattggatttcaaaattttgccaaaatataaatatcatttatctaaaaatgtaaaactattaatagaaacggaaccaaaagcttttgttacagtaaccaacaataataatgttgtatgcataggcaatgctaatgaagctggtacgtatttatgtaatgtatctttaacaaatggagaaaacaaaatagttattagctctattgaccctacaggagacaaagctgaaaaaactattgttttatacaaagacgatttaataatatatttgccctctataacatcatttgaagggaaagccttaatagtatatgataacaaaattgaagaagaaagaagttcaataaacttctttggattttatactaacaatgttaaggttgacgtctatgcatcaaacaaattagtttgttctaactaccaaaaaccattatgtgaaaaaagaaataacatatattttatagcgaatacattatcggcattggcaacaaaatacaaaacagaccaaataaaaataaaagcccaatttggcgatttaaatagagagataactgtggatttaaagagagaaagcgtatccctaggaaaatactctatcgctctcggaggggcgctattgccattctttagacaaagcagcgagaacatattattattcgctctaagcgccataatagtatttggaaccgctttagtcgatttaaggagaatatccatagaattacctaaagcaagaatagagtttaaccttatagacaaaatcaaaaatttattatcaaaaattaggaaagacttgaaatga

SEQ ID NO: 513 - protein, 686 aa, Nanoarcheum equitans
MRWLSLLLIPIALSLVIENNSCLKNGNHTIYVKSKYFDEKMNISIGDKEFSCIRSKIEENYVLYKCNININLSDGLYDLKTPLESYTICIDNQPPTIEIGGQYINVSNNYCFYDFNPNINVKDNGCCEKTDLYIYYNGELVKEITKPGFYIIKASDKAGNTIEQKLNICFPETNKPTIKLIDYKVGTNINATFYVKDDSLIKEVSYCNINPIKEGYINCSLPKQETVTMTVTDIYNNSYSETFVFDIEPPTIKIIDPIPIDNTIYLNASKLEVSLLVSPDTKKCWLGNQELPIVNNIVKAMFSDSGDYTIVCEDEKGNKAQKTLHVIVDTIPPELNIIDYGYNVDDKGVYAYIRYTISPDAYVKVYKNGVYLQNSYSGIIKDYNVFVGQKYVYTLEPIDYANNKGESKEVVIYIKSDKKCKLDFKILPKYKYHLSKNVKLLIETEPKAFVTVTNNNNVVCIGNANEAGTYLCNVSLTNGENKIVISSIDPTGDKAEKTIVLYKDDLIIYLPSITSFEGKALIVYDNKIEEERSSINFFGFYTNNVKVDVYASNKLVCSNYQKPLCEKRNNIYFIANTLSALATKYKTDQIKIKAQFGDLNREITVDLKRESVSLGKYSIALGGALLPFFRQSSENILLFALSAIIVFGTALVDLRRISIELPKARIEFNLIDKIKNLLSKIRKDLK

SEQ ID NO: 514 - DNA, 462 bp, Nanoarcheum equitans
atgaacctaagaattccttggaaagaagtatattatttgggctataacatgggtaactatataaaaattagtgagcccgaattattgtttgttctaagaaacaaacctcagattaaagatagattaaaattggacgaaaaaactataataaaagaaggagtaaaaaaatataaaaatttttgggaaatttattacaccgtaaaagatttgattttgagaggttatagagttagatttgacgggttttttatagagttatatgaaaaaggtataatccctggaacaatagagcaagattatttggtttatcccgttagtggtgaaataagaatgacttggggagaattattagatatttataataaagcaattgcaagaaaatcaaaatttatgttagcaatagtggatagcgaaggagatgtcacttattacgaattccgaaagctccgttccaataaatag

SEQ ID NO: 515 - protein, 153 aa, Nanoarcheum equitans
MNLRIPWKEVYYLGYNMGNYIKISEPELLFVLRNKPQIKDRLKLDEKTIIKEGVKKYKNFWEIYYTVKDLILRGYRVRFDGFFIELYEKGIIPGTIEQDYLVYPVSGEIRMTWGELLDIYNKAIARKSKFMLAIVDSEGDVTYYEFRKLRSNK

SEQ ID NO: 516 - DNA, 390 bp, Nanoarcheum equitans
atgcaatatctatatttgttagcaggcataacagatattttgtctttggttttaccaataaataatagtttagccctagctgtatggctttatatagcaatgaaagacaaaaacttttggttgtatataggtacaataatgttattgctattaccccaatattatttagtgccatataacataggggattttgttatattatctttgtatgttatagcgtttttctttttcggtttaggtttgctagaatataacaatttattggccagaattacaggaataatttatattctcgctgcagcatatttttatttgggtttgcctttagataaaattgccacaatactagaaggaatctatttattggaacggagctttcggaattcgtaa

SEQ ID NO: 517 - protein, 129 aa, Nanoarcheum equitans
MQYLYLLAGITDILSLVLPINNSLALAVWLYIAMKDKNFWLYIGTIMLLLLPQYYLVPYNIGDFVILSLYVIAFFFFGLGLLEYNNLLARITGIIYILAAAYFYLGLPLDKIATILEGIYLLERSFRNS

SEQ ID NO: 518 - DNA, 192 bp, Nanoarcheum equitans
gtgaaagctaaagatcttagacaaaagagtgtgcaagagttaaaagaattattggccaaattaagagaggaactaagagtattaaacactttatatataaataaaagaccttttaactatggtaggagaagacaaataaaaagagatatagctaggattttaactgttctaagagaaagaaatgaagcttaa

SEQ ID NO: 519 - protein, 63 aa, Nanoarcheum equitans
MKAKDLRQKSVQELKELLAKLREELRVLNTLYINKRPFNYGRRRQIKRDIARILTVLRERNEA

SEQ ID NO: 520 - DNA, 318 bp, Nanoarcheum equitans
atgaagcttaagaaaataagcggaggttttgacgagttattagaggaattagaatcgcagatagaacaggaaactagaaaaatcaaagtagtattagatgaaagaaagaagaaaaagagaaccccaagtaaagttactataatttatgggattcctgaggaagaagcagaggaagtagtaaaatatttaaagaaaaaaatagggactggaggaacatacaaaaatggcgctatagagcttaggggagatgttaggaaaaaaattaagccaatccttattgaattgggctatagggaagaccagattgagatagaatag

SEQ ID NO: 521 - protein, 105 aa, Nanoarcheum equitans
MKLKKISGGFDELLEELESQIEQETRKIKVVLDERKKKKRTPSKVTIIYGIPEEEAEEVVKYLKKKIGTGGTYKNGAIELRGDVRKKIKPILIELGYREDQIEIE

SEQ ID NO: 522 - DNA, 1251 bp, Nanoarcheum equitans
atgccttccattaaacccccactaatagcagtagaattagaaaacccaatgctcggagaagtaatagatttggaagaaactaaagccatagttattgctgcttatgaaaataaagctttagctttattgtttgactattatacaggagaaataaagcaaattaatagacaaggaaacacatacaaaatagctgttagcgaagattatattgggggcatattcaatggatttggagagccaataaaaggaccaaaaccttatcctgaggattatagagacattaatggtttagccataaacccctatgctagaaaggttccaaacgaaatattgtatacaggtatttcctcaatagatgttgcgcacccattattaaaagggcagaaaatagcaatattttcccccccaggtttgcctatggaaaggctagccctccaaattgctagaaatgtagctaaagacaaaacaattatatttgcagcaataggtgtgccttccgatatatataaaatgtttatcgacgaattcataaataccaaagctataatgaatagcgccatatttatttctaaagcggatagctctcctatagaaaaaatttacactccaagagttgcactaactttagcagaatatctggcttttgaaaaaaatagagatgttttggttttaatgttagatatgactaattatgccgatgctttaagagagatttcaaccttaagaaaagagatcccctctaggagaggataccctgcttatttgtatacagatttagcctctatatatgaaagatctggtttaacatcaaagggctctataacattaatacctatgctaactatgcctggtaatgatataacccatgtagtgccagatttaaccggttatattacagaggggcaatatgttttatctcaagatttgcattctaaaaatatttatcctccaatagatttgttaaaaagcctatctagattagctaaaaatggtatgtctaaaaaacataaaaaatatgcagatatcttaataaaaagctatgctaaaggcttagaagctagagacatagcaacaatagttggggaagactctctatcaaaagaggataaagcctatttaaagtttgcagaattggtggaaaaagaatttattaaacaagactattacgaatatagatccatagagaagagtttcgaaataattgattctattctatctcaatctggtcttccctatagcccaattcaataa

SEQ ID NO: 523 - protein, 416 aa, Nanoarcheum equitans
MPSIKPPLIAVELENPMLGEVIDLEETKAIVIAAYENKALALLFDYYTGEIKQINRQGNTYKIAVSEDYIGGIFNGFGEPIKGPKPYPEDYRDINGLAINPYARKVPNEILYTGISSIDVAHPLLKGQKIAIFSPPGLPMERLALQIARNVAKDKTIIFAAIGVPSDIYKMFIDEFINTKAIMNSAIFISKADSSPIEKIYTPRVALTLAEYLAFEKNRDVLVLMLDMTNYADALREISTLRKEIPSRRGYPAYLYTDLASIYERSGLTSKGSITLIPMLTMPGNDITHVVPDLTGYITEGQYVLSQDLHSKNIYPPIDLLKSLSRLAKNGMSKKHKKYADILIKSYAKGLEARDIATIVGEDSLSKEDKAYLKFAELVEKEFIKQDYYEYRSIEKSFEIIDSILSQSGLPYSPIQ

SEQ ID NO: 524 - DNA, 6594 bp, Nanoarcheum equitans
gtgaaaacaaggtttacactactattaagtttattattgctaaattctattcctattgctatttccgatagctatggctgttgtgtttggaaagtaaaaaatactgctacgggagaagaagaacatatagcattacaaacctataaaagtttttgtgaattgccgaaaaaagatgataaattcaaagatttggattatttactaaacttcttgaaaaaatcaggagttgtatcaaatactaaattggtagaatcctttatagaatcaaataacccattaaaaggggtttcacagtttttgtctagtgtatgtgatatactatcgcaaggcgaacaaaaggctttagcattaaaatataggatagcaaatttagttttatccccagttagggaaataagagattatttaaatgaaacccaaagaaaaataagagaaagacttaataatttgggttctttagggaaattaattaacatagaagggaatattccatccgttgattgttctgttgctgggaataccatggcatcaacggacagcatcgtatcagcaatagaaagcgctatcgattgtgtatcgaaaggcattagtaaatctatagaatgggaaaaaaagagaacagaagaattagtcaaactatctaaaaattatcaacaattaatagataatagcagcaaattgtatgaagatttggttaaactgaaaagcactttgtttatagataaatttaaatgtgatacaaatataactgatataacatataccaaagatggtttgcttgtgccatgtaagttagaaactattaatataacagcaaaaacttctctagattggcatattagcgcttttaatatatcaataagctatgtggagaataactacactgtcacatttaaatacaataataaggacatggtttacctaaattatacatgcgagaataatacaatctccgatatctctaccactactacagacaattggataaatatgtttaatcctatattagatacaaaatcaatagcagagcttcttaataataacaatataatattaagggtaaatgctactttattcgatgggtcttctgcttctttgtatagtacaaacataaccataaacaattgtattgctcaaatctcgacaagatcctttaaatacccagtatacaatatatcgttagaagctaatggagaaagaattgaaaatccccatatcataggtattttaaatattagttatgatacgaatccagataatggaatcgtaaacctttctataggttctttaatacctaacaactattcaaacatatttaaagcccaatatatagcgagaaagggcatatggaacataacagaaagcgaggcttggtttattttagaggcaacttcaagtgggaaaaccttaaagcttaaagcatttacagaattaagagccaatataacaaatatagaaaggctggaaaacgagttatcccatgtaggcataaatcaattaactttcattaaagaaaaaatcgatgaagcggtaaaagcattaaaagaatcattgaatatatctaattattcttgtcctgcattaaagaaagttttacctaaaataaaaagaagggtattgcacgaattatataagcaaataaacattgatgaaatacaaaaaataattggtttgtctgatatgaatatatctctagagagctgtatagaattaactaaaacaaacccaaatgatccaaggtatgaacaattattaaaagagtgtgccaaccaaacaacttactattttggagaaaacaatatagacaaggcctattttatatcgaaatttttggcttatttatatggagatatagaccaatccttcttatggtatggcattactaattgtgtaacatggtatatgtggcatactagatatcaatgctataaagcaatgcctcctcctatatgtgatagcgttataataaatgttagaaataaccttctctctagaaatgctagaaacgttcttctttctaatatacgaaataatagttatgccactcttagtaactatttaatacattatgcagcatacaaagttgttaatgatattgttaatgaaattattaatgaattaaacattgatgactttgtccagtacaataataaaaaagaactcattaaaaattgggtatcgaatagtatatcccattgcttgggcgaggttgatatattaatgtttttaacagctaatatagatttggaaagactataccaacaagagctacaaaattatatagcattaagtgtcctaacacctttgtcgatatattcttctaacgaagtaaaatacataagagaaatggtaaaatcccaattagagatgggtttgtctagtctagataacaaattagaacctataataaacactttactaaccaattctttatataatttggcgtatagtttatcgcaagtcacctcatcattaacaaattactttagttcggttgtttcttctattaactctttggtattgcctagtacaattggagaaataaaactaatagattataaaacattaaaagccattgctttaataccaagctctgttgaacaagcgataatcaatagactaactaataaagtttcatacaatattctattagaatgtattgatactaagctatcaaaagcggccaatgcccagatagcattagcaaaacttaaaggctatctttctattatagaaggaatcgacccagattcttatccagacaaaaaagcccagttagaacaattaataagcaaagtaaaagaagtcaaaaaaattattgaagagcaagaaagtactctcaaaaaagacctggacaatacaataaacctatacaaagaatttataaaaggaagcaccgaatatataaataagggtatcgaaaatctggcttccattcttaatgcagaatataaaaagttcgaagagttattattaagaacataccagcttgtgctaaacgatttaattgggttggtcgatgattatttaacattgtttgacaataaagtagaattaataattaactctatatatgctaggtataaaacatgtaaagagagtagcaaacaattagaaaaagccatacaaaatgttggaaaagctgttgataccataataaacactttaagttcggtttttggggtactatcaaccccaacaggaacggtacaaccaaaaagaattgttgaagatgcatatttctatgttgatagctgcaataagatagcgaaagggagtaaaaaccttttggaaatattagatggttatcaatttatatacaataataaccaatttgtttttgacaaaggtttaatattagatacattcaaaaaagagtttaaggctctattttatagtttagcaggaaaggaatacaaaaaagaacctatagattccagttctggaacaaatgaaaatataatatttccatttttaggagaaactgctaatggtgataaagtagatttctctcaagtgctcgcaataaatcgatataatgaaatcgacatcgataatattatgctaaacaatattagtaaagctatagaggaaataaaaagcataaaaattaatgttagttatggtgttgggttattaccaaaagatgtttttaattatgtaaatggcactaatcaatttaattttaattccttatatgttgctggtgcatttttggaccaattgccattctttccaattttgagatccctattattattttacactcccaactctaatataaaaagaataaacatctgcacaataaataaagaaccatgtaaacccattatcgcttatgttacagcaaatgccataccaacaataatgagcaaactacaacaaaaattgataggaaagatgtcaagtgttaatattgagggggagggcgaatgtgctattgatagcatctctgcaaatagtgaaaatgtaatggaaaatatagggaaatgcttaatagaaatttttggtaatgaagaaaatatctctctatcaataaaaagatggtatgctataacagatatattttgcaacgaaagttataagactaaagagaaagttatatacatagcaaccccatcgaaaaccttcttaataccctttaatggagaaatccatataaattggagcgataatatttgcaaaaaactattggaaggatggaaagatatattaagtaaaatgttaggagagaaattagaaactgaaaataaagtagtaacagttactccaacttcttatgcatatagctgctatgtcaatggagtagatagtagtagtggaaccattaaagatataagagttctatcactcgatgataaattagttaaaggcaaatgcgattctcatgaagggtttgttactatgcaaattaatggaaataaaaaaacctatacaataatatacaagagtattcctaacaaggcaaagcttgagtgtgataaaacttctatagacatagatccatatataactatatacccaactaatggaggctacaaaataaccaatggaaaaacttctataaaagttaataatattaattgtaatataaacattagcaatcccgatgggtcatatgaaaaaatatcaataaacctaggaaacggaatacctaacttgagaataataaaaattaaagattcttctaatactatttatttcgctataagtgatagcaaaactcccaaattatctgatggatgtggaaaaaaagaatccctaccaactccaaaatataaagtttattctattaacttagcagcaaatacatggaaattattggaaataggcaacaaaaaagtatggttatatgacgatggttctaagatatatataagtaagtacccatatgtggaatacgatatggaaaataaagttgttgcctatggcaatagaattgcttgctatcaaccgtataactattatagcagcccaaactttgaaaaaagtaagactaattgctttactatagaggtatccaataaagaaataaaagctgagaacgaaattaaagatattatgggcttatttggatgcgtatttgaaaatccatttgcaaaggcagggtatgctatatataatgagaatggtgaaggattaaaggttgtaactatgaaagatggtacaatagttaaacaacaaaatgtgccaatattttggaatttgatatttagggaagctgtgaaaacacctatagctcccgtgttaaataacttttctttctctattaatgggataatggaacatgcagtccccaatactttccgtgcggtacgggctataaaacttaaaagtgacaataatatagaatatgttaatattagttatggagaaagtgtctctattgaagatggagaattattatgtactacggaagcttgttattataatactgggggaactttatataagatagttgaaggcgagattggcgacagaggtgctttaaaagtttctaaactatctggatctagttggggaaatagcggaattgatcccgatctatatgatacagagtttacttatagtggagcaaatattggtaaagttgttgctgtagcaaaaattattgatccaaataataagagatgggaactatacgtttcaaaaactggatctggaaagactataaagatagaccatccttctcccatcactatagataacaataactggtatagaaaatacagcactttttatgctgggtcagatagcaaatattattatgtaaatgtaactgttttaaatggagaagtacaacactacagtacgggcaggcagtgtgttgcaaatgagggaggaagttgtaaaatgtataatgtatttatcgatttaatagataaatggataattaaagataatggcggcaattatgtagaaaagcaaaaaccctcacagtatgcatgctcctataagaacgcctattgttatgactacactaatggtggctttaagtatgaggctaacatatttatatctaacaacaaaataataaaccctggtgattgtaatcctgttgataaactttgtatcgttaaagaaggaaataactatgccatatacggaaaatatgatagcgcttcttattacaaagatggtgcacataatacatataaagaaccagcgtcagcagacatatttttggttaacactacagataataaacatataatattcattccaggttttaataaaatagaatgtaaaactagtagtgatggcgccaactatagagggataactatttcaacaaattgggttgcaatgctaatagacaataaaggaaatgttaaattaattggttcgggttctcctactacagttaacgatccttatctaatttgtaacgtgtctattgggagtaataaatatacaataataaaagctccaaaagagaacgtagtattaagcgatggagaagaagcttcccctataataacaaacgatggctataattattatatactagttaacgttaataatctctgcattgctagcagtatctatcaatgtaaaagtaaaagcgaagaaacccgctttgttgaatggtaa

SEQ ID NO: 525 - protein, 2197 aa, Nanoarcheum equitans
  signal (1)..(22)
MKTRFTLLLSLLLLNSIPIAISDSYGCCVWKVKNTATGEEEHIALQTYKSFCELPKKDDKFKDLDYLLNFLKKSGVVSNTKLVESFIESNNPLKGVSQFLSSVCDILSQGEQKALALKYRIANLVLSPVREIRDYLNETQRKIRERLNNLGSLGKLINIEGNIPSVDCSVAGNTMASTDSIVSAIESAIDCVSKGISKSIEWEKKRTEELVKLSKNYQQLIDNSSKLYEDLVKLKSTLFIDKFKCDTNITDITYTKDGLLVPCKLETINITAKTSLDWHISAFNISISYVENNYTVTFKYNNKDMVYLNYTCENNTISDISTTTTDNWINMFNPILDTKSIAELLNNNNIILRVNATLFDGSSASLYSTNITINNCIAQISTRSFKYPVYNISLEANGERIENPHIIGILNISYDTNPDNGIVNLSIGSLIPNNYSNIFKAQYIARKGIWNITESEAWFILEATSSGKTLKLKAFTELRANITNIERLENELSHVGINQLTFIKEKIDEAVKALKESLNISNYSCPALKKVLPKIKRRVLHELYKQINIDEIQKIIGLSDMNISLESCIELTKTNPNDPRYEQLLKECANQTTYYFGENNIDKAYFISKFLAYLYGDIDQSFLWYGITNCVTWYMWHTRYQCYKAMPPPICDSVIINVRNNLLSRNARNVLLSNIRNNSYATLSNYLIHYAAYKVVNDIVNEIINELNIDDFVQYNNKKELIKNWVSNSISHCLGEVDILMFLTANIDLERLYQQELQNYIALSVLTPLSIYSSNEVKYIREMVKSQLEMGLSSLDNKLEPIINTLLTNSLYNLAYSLSQVTSSLTNYFSSVVSSINSLVLPSTIGEIKLIDYKTLKAIALIPSSVEQAIINRLTNKVSYNILLECIDTKLSKAANAQIALAKLKGYLSIIEGIDPDSYPDKKAQLEQLISKVKEVKKIIEEQESTLKKDLDNTINLYKEFIKGSTEYINKGIENLASILNAEYKKFEELLLRTYQLVLNDLIGLVDDYLTLFDNKVELIINSIYARYKTCKESSKQLEKAIQNVGKAVDTIINTLSSVFGVLSTPTGTVQPKRIVEDAYFYVDSCNKIAKGSKNLLEILDGYQFIYNNNQFVFDKGLILDTFKKEFKALFYSLAGKEYKKEPIDSSSGTNENIIFPFLGETANGDKVDFSQVLAINRYNEIDIDNIMLNNISKAIEEIKSIKINVSYGVGLLPKDVFNYVNGTNQFNFNSLYVAGAFLDQLPFFPILRSLLLFYTPNSNIKRINICTINKEPCKPIIAYVTANAIPTIMSKLQQKLIGKMSSVNIEGEGECAIDSISANSENVMENIGKCLIEIFGNEENISLSIKRWYAITDIFCNESYKTKEKVIYIATPSKTFLIPFNGEIHINWSDNICKKLLEGWKDILSKMLGEKLETENKVVTVTPTSYAYSCYVNGVDSSSGTIKDIRVLSLDDKLVKGKCDSHEGFVTMQINGNKKTYTIIYKSIPNKAKLECDKTSIDIDPYITIYPTNGGYKITNGKTSIKVNNINCNINISNPDGSYEKISINLGNGIPNLRIIKIKDSSNTIYFAISDSKTPKLSDGCGKKESLPTPKYKVYSINLAANTWKLLEIGNKKVWLYDDGSKIYISKYPYVEYDMENKVVAYGNRIACYQPYNYYSSPNFEKSKTNCFTIEVSNKEIKAENEIKDIMGLFGCVFENPFAKAGYAIYNENGEGLKVVTMKDGTIVKQQNVPIFWNLIFREAVKTPIAPVLNNFSFSINGIMEHAVPNTFRAVRAIKLKSDNNIEYVNISYGESVSIEDGELLCTTEACYYNTGGTLYKIVEGEIGDRGALKVSKLSGSSWGNSGIDPDLYDTEFTYSGANIGKVVAVAKIIDPNNKRWELYVSKTGSGKTIKIDHPSPITIDNNNWYRKYSTFYAGSDSKYYYVNVTVLNGEVQHYSTGRQCVANEGGSCKMYNVFIDLIDKWIIKDNGGNYVEKQKPSQYACSYKNAYCYDYTNGGFKYEANIFISNNKIINPGDCNPVDKLCIVKEGNNYAIYGKYDSASYYKDGAHNTYKEPASADIFLVNTTDNKHIIFIPGFNKIECKTSSDGANYRGITISTNWVAMLIDNKGNVKLIGSGSPTTVNDPYLICNVSIGSNKYTIIKAPKENVVLSDGEEASPIITNDGYNYYILVNVNNLCIASSIYQCKSKSEETRFVEW

SEQ ID NO: 526 - DNA, 588 bp, Nanoarcheum equitans
atgaactggtttgatctattagtctcttcttctttgtttatcactatgctttcaatgatctatactcattatatttataacgatatctatagtgcctatttggaaagctacgattttgccaataaaatggtttatcgctattgtttatacaaatttctaagcaataacaattttaattgggatagcatttataacaatttaactaataatagctttacaatccaatgccttaataatactatttatgtttattatgagataaaagaagtccccacaggtaaaagccctacatgttataaatgcctatatttcgatataggaaattacaaaaaagtatgcactaatacagagacaataatagaagcacactttataaatgcgacttctggggatataatagacaataaatggtatgcaaacaatggttgtgctttagtttatgacgattatataaaaatacattatctaaatggctctgtatggggttaccaatacaaaaatggttataaaacttggcccatttatagtgaaagcatatatttaaaaagccacatagggaaaattaaagttttattcactttgtcgtag

SEQ ID NO: 527 - protein, 195 aa, Nanoarcheum equitans
MNWFDLLVSSSLFITMLSMIYTHYIYNDIYSAYLESYDFANKMVYRYCLYKFLSNNNFNWDSIYNNLTNNSFTIQCLNNTIYVYYEIKEVPTGKSPTCYKCLYFDIGNYKKVCTNTETIIEAHFINATSGDIIDNKWYANNGCALVYDDYIKIHYLNGSVWGYQYKNGYKTWPIYSESIYLKSHIGKIKVLFTLS

SEQ ID NO: 528 - DNA, 1041 bp, Nanoarcheum equitans
atgaggcaatatcaatatatagcgataggcttaggtatattattatctatactagttttatatttaggattccttttcttaggaaacctattgttcaaagacgtatcttatatacttctaatagctacactatctatagttttgggcttagctccttacatggtataccaatatatgattgctagagaacagaaagctttagaatctgtgtacccatcatttttaagagatttagccgaaagcgtttcttctggtatatcattaatttatgctctaaagctaacagctaatgcagattatggagcattaaacaaatatttaagaaaactagttatatggcttagctggggaataccattcccaaaagctatggaaaggtttaataaatatttctattttagtcctgcaattaggagggcaaacgaaatattattagaaatatataaaagtgggggagatatagttaaaactttaagattactagcagaaaacatagagaaaacctctgaaatgtataaagatataatatcccaagtaaaaagcaaggttttcgtaatttatatgatatttctaattttagtagcaatagcagtaataataaaaccaatatttgcagaagtattagtatcaaaaataggaggcaagggtattgatgtttcttatttcaaatttctatcttttttgatggtaatatcttttgctatttcttcctcaataatggccgcagctgttgtagggggtaacatagcagacacaataaaacatgcatcaataatgtttttgattggtattaccgcttatactttatttgtattgcccccaacgataaaatgtactctgtcacaacaatctaaatctacaatggtattatcattatatgttgatggtaacccataccaaggcccagtaaccatagggaataaaatctataatgcaatagcaggaaaagtagtattgcctttagaagttaacaaaccaattaccgcaaaaataaaaactgatttcggagaaagcacttgtactacaatacttaagccatga

SEQ ID NO: 529 - protein, 346 aa, Nanoarcheum equitans
MRQYQYIAIGLGILLSILVLYLGFLFLGNLLFKDVSYILLIATLSIVLGLAPYMVYQYMIAREQKALESVYPSFLRDLAESVSSGISLIYALKLTANADYGALNKYLRKLVIWLSWGIPFPKAMERFNKYFYFSPAIRRANEILLEIYKSGGDIVKTLRLLAENIEKTSEMYKDIISQVKSKVFVIYMIFLILVAIAVIIKPIFAEVLVSKIGGKGIDVSYFKFLSFLMVISFAISSSIMAAAVVGGNIADTIKHASIMFLIGITAYTLFVLPPTIKCTLSQQSKSTMVLSLYVDGNPYQGPVTIGNKIYNAIAGKVVLPLEVNKPITAKIKTDFGESTCTTILKP

SEQ ID NO: 530 - DNA, 882 bp, Nanoarcheum equitans
gtgttatacgagattggcataaaatatttaggttttttggttgatctatattatactctattcaaagatttagacaaagacttaaaaaaagcggctattcctttaactagctatgaatatgctgcccaagcggtaactgttggattattaattgctttgcccacttctatattaattggcatattaatttgttttttagcaaacctatttaaaatatctattttgcaaaataccacaataataatactaatcacaataatcttgtttttaataatatttcatttgattttgcttttttataccatatacccttctataagaataccccaaagaaaagcttctatcgaaaaaaacctaccttatgccactctatacatggctacaatagccaataccggggcgcctccaatagctatatttaggtttctctctaggatgccagatttcggagaaataagacaagaggcaaaagatatagtagaaatggtagatgtgcttgggcaagacttattaagggcattagacaaaaaagccaaatatagtccttcaaaacaatgggccgaactattaataggcttaaaaactatactagaaagcgggggagacttaagtgaatatctatatagaatgtccgatctatatagtagggaattaagaaggaaagtccaacaatttggagatctattaatgatggtagtagagatgtatctaaccttggtaatagtcggaggattttttatgataatattaagccttattatgggaggtatgggtggcgatatcgaagcaataaaggtgatgcatatattattattaggattagtaataccaatagtaagtattggattagcttttatgattaaatctatgttaccaatatga

SEQ ID NO: 531 - protein, 293 aa, Nanoarcheum equitans
MLYEIGIKYLGFLVDLYYTLFKDLDKDLKKAAIPLTSYEYAAQAVTVGLLIALPTSILIGILICFLANLFKISILQNTTIIILITIILFLIIFHLILLFYTIYPSIRIPQRKASIEKNLPYATLYMATIANTGAPPIAIFRFLSRMPDFGEIRQEAKDIVEMVDVLGQDLLRALDKKAKYSPSKQWAELLIGLKTILESGGDLSEYLYRMSDLYSRELRRKVQQFGDLLMMVVEMYLTLVIVGGFFMIILSLIMGGMGGDIEAIKVMHILLLGLVIPIVSIGLAFMIKSMLPI

SEQ ID NO: 532 - DNA, 1191 bp, Nanoarcheum equitans
atgaaaatatatcctgatttgtctataatattcataggacatgtagaccatggtaaaaccactttagctaaagcattaactggaaaatggctcgacacttataaagaagagcaacaaaaaggtataacaattaggttgggttatatagatttttctatatataaagacccaacaaaagagggatatgaagcttatactactcaaccatgtgaaggttgtgaagaaataaggaaaatctctttagttgatgctccggggcatgaaagtttaataatggtaatgctttctggagcagcattagtagatgcagcagtattagtagttgctgctaacgaagggattatgcctcaaacaatagaacatctaaaagctgcagagataatgggaataaagcatttcattgttgctcaaaacaaaatcgatttagtaactaaagaacaggcaataaaaaattacgaagaaataaaaaaactaatagatacctatataattcctatatctgctatacataatgtaaatatcgatgctttgttatattatttgacaaaaataccattacccaaaaaagaggaaaacaaagacccattgatggttgtagcgagaagttttgatgtaaacaaaccaggaacagatccaaaaaaattagttggaggtgtcttaggtggttctctcaaacagggtaaactaaaagtgggggacgaaatagagattaggcctggtataaagatagaaaacaaatggcaacctatttatacagaaataacttctattagacaaggtaactattttgttgatactgctttacctagaggcacattagctataggcacaactttagatccttttttaactagagaagataatttggcaggccaagtagttggttaccccgataaattacctccaatgtgggataaaatagaaatagaatactctttattcgaaaaagctgttggcacagaagaaaaggttaaccctcctaaaaaaggagacaaacttctggttgggggtttatccataataagcccagcattagtgatagagtcaaaaaaagatagattgtatctaaaattgtccaaaccattagtattaaatgaaaatgatagaatagttttagctggcaaaataaatgggagatggagaataataggatatggctacctaaaagggggtaacgaatataaactataa

SEQ ID NO: 533 - protein, 396 aa, Nanoarcheum equitans
MKIYPDLSIIFIGHVDHGKTTLAKALTGKWLDTYKEEQQKGITIRLGYIDFSIYKDPTKEGYEAYTTQPCEGCEEIRKISLVDAPGHESLIMVMLSGAALVDAAVLVVAANEGIMPQTIEHLKAAEIMGIKHFIVAQNKIDLVTKEQAIKNYEEIKKLIDTYIIPISAIHNVNIDALLYYLTKIPLPKKEENKDPLMVVARSFDVNKPGTDPKKLVGGVLGGSLKQGKLKVGDEIEIRPGIKIENKWQPIYTEITSIRQGNYFVDTALPRGTLAIGTTLDPFLTREDNLAGQVVGYPDKLPPMWDKIEIEYSLFEKAVGTEEKVNPPKKGDKLLVGGLSIISPALVIESKKDRLYLKLSKPLVLNENDRIVLAGKINGRWRIIGYGYLKGGNEYKL

SEQ ID NO: 534 - DNA, 1104 bp, Nanoarcheum equitans
atgaaaaaagttttcctatccttattgctggtctctacagcttttgctttccctataactaatatagatgtaaaacaagcgataacacaatttgaccaattcttacaaatgtgggataaacttccacaatcgcaaaaagaacaaatcaaacaatatattccaatggtagttaaaaacttggaaagctatatgcctttaataaaacaagaattaattaaacaaggtttatctaatgaagctaaccaattagagaccttgtttaacaaactaaaaacaaatccaaatgaagaaaatttcatagcatttttgaaatacttaagacaaataattaacaaagcccaaccagaacaaaaaacacaaaaaacagaaataaacacaaaccaaatattgcaaaagttaatgccttattttacgatagagccaataattgatgaaaatgttaagcaattactattaaaatataaagatttctttaaattagattgtatcaaaaaagccattaatgaaggtaattttgaattggctttcgctttattacctttagagtttaaccttaatttatttgatccaaaagatattgccaaaaaggttatagaaactaacgattatgaaaaaatagtctattggttagccagtttgaaaacagataacaaagattttataaaaaacgaaattatcaatagttgttatggcaataaacaatccctaatagagtgggctaaagattatttttctaaatatataagcccaaaagaaaggcttagctctattataacccaacttagatttatagctaatgaattaatgaaaaatcccaataatattgaattaaaaaggaaagctattgaattaataaagcaatacctaatagcgaagatcgacattattttagatagtgtaaaaatagaaaataaagacgaggattatcaaatattagaaatactatatttgttagaaggggaggaaagcccctatttgtatatagagcaactaaaagaattaaaagaaaaaattgcaaatgctaatactgtaaaagagctaatagaatatactaagcaatatttaatgctaaaagaaaagctgaaaaattttataaaccaatag

SEQ ID NO: 535 - protein, 367 aa, Nanoarcheum equitans
  signal (1)..(16)
MKKVFLSLLLVSTAFAFPITNIDVKQAITQFDQFLQMWDKLPQSQKEQIKQYIPMVVKNLESYMPLIKQELIKQGLSNEANQLETLFNKLKTNPNEENFIAFLKYLRQIINKAQPEQKTQKTEINTNQILQKLMPYFTIEPIIDENVKQLLLKYKDFFKLDCIKKAINEGNFELAFALLPLEFNLNLFDPKDIAKKVIETNDYEKIVYWLASLKTDNKDFIKNEIINSCYGNKQSLIEWAKDYFSKYISPKERLSSIITQLRFIANELMKNPNNIELKRKAIELIKQYLIAKIDIILDSVKIENKDEDYQILEILYLLEGEESPYLYIEQLKELKEKIANANTVKELIEYTKQYLMLKEKLKNFINQ

SEQ ID NO: 536 - DNA, 543 bp, Nanoarcheum equitans
gtgatagttgatgcaataatgtatctaaaacaacagggtttttatgtcctaatagtgggaatattcgtttatgctattacggattatgttttgtctaaaattatgaaagataacccagcgaaagggttaatatccttatctgcagctttaatagttattacttttggcaaatttatagaattagtagagcaattagtagcttggtatattagttttatagtaatagtatttttgtttttagtcgctgtcgccacagttgggggggaagattggttaaaaaaattggaagaatttgcaaaaactgacaaaaactttaaccaagctatacttggggtaggtatattaatatttatattcgctgctgcgagagtattctctgaatctttgtttggtccatccgatatagagaatattacagatccaacggcattggccatggcagtaattagaaatcctaacatattagcagtatttgcatttttctttgctttggtaggagcagtttttgttgttaacggtatacaacctaaccaaaagagataa

SEQ ID NO: 537 - protein, 180 aa, Nanoarcheum equitans
MIVDAIMYLKQQGFYVLIVGIFVYAITDYVLSKIMKDNPAKGLISLSAALIVITFGKFIELVEQLVAWYISFIVIVFLFLVAVATVGGEDWLKKLEEFAKTDKNFNQAILGVGILIFIFAAARVFSESLFGPSDIENITDPTALAMAVIRNPNILAVFAFFFALVGAVFVVNGIQPNQKR

SEQ ID NO: 538 - DNA, 1125 bp, Nanoarcheum equitans
atgttcgagcaatattggaacaaaaaatttagaaaatataaatttcctggcttaaaaactaaagcagcaaaacaattaaaaaaagattatgatttgttgtttaattttatattaaaaacaaaagatttcgttttggccttatataatagttataactttttatccgaatataattctaaaattattggtttaaccaatacccatgataaattaatcgaattagataaaaagttagagggattaatcggggaaggagaggctttaatagataattggttgcaaaactcaaacccctcttatatagagatgtcttttaaacaagaaattggaagctgggaacaaattttaatatattacaaaaatttagccaactattatataaaagaagagcgcaatcttaataaccaatcattaaataatttgaaaaggctgagaaattcgataaaaaaattattagatatcattacaaacgaatataaacatttagtaaagcttggttttattgacaaatcttttttagctagttgggactattatagaaaagcactattgcccgactattacatggccaaatatatagaaattaaaattggaatattaaacaaaataaatttcaaaaaagctgtcaaatccaattattacgagataccaacattgttaggccaatatttagccacattaatagagtatttggtcgctaaaagtacaaaccataaaaattacatatcacaaaaagccatagaagttgaaacctttaagaatagttataaaactataaaggaaataatgggaagacaaagaaacataattaaaatcgcaaaaaacatttgttattcaaaaatgaatagtacagagataattttaaaagagaatgccgatgcgttaactaaagcgaaggaaagactaataatgaaacaggcttttactcaattatatcaattgttaactgaagtggaaaggtatatggattacatagaggaaaatattcctgattatactaataaattcctagaatgggcaaacaaagctgttttatattatgaccaatatgtagaaaggctaacagagacaagagattatataagtgttaaaatagagaagcttttagaaaaattggctcaatag

SEQ ID NO: 539 - protein, 374 aa, Nanoarcheum equitans
MFEQYWNKKFRKYKFPGLKTKAAKQLKKDYDLLFNFILKTKDFVLALYNSYNFLSEYNSKIIGLTNTHDKLIELDKKLEGLIGEGEALIDNWLQNSNPSYIEMSFKQEIGSWEQILIYYKNLANYYIKEERNLNNQSLNNLKRLRNSIKKLLDIITNEYKHLVKLGFIDKSFLASWDYYRKALLPDYYMAKYIEIKIGILNKINFKKAVKSNYYEIPTLLGQYLATLIEYLVAKSTNHKNYISQKAIEVETFKNSYKTIKEIMGRQRNIIKIAKNICYSKMNSTEIILKENADALTKAKERLIMKQAFTQLYQLLTEVERYMDYIEENIPDYTNKFLEWANKAVLYYDQYVERLTETRDYISVKIEKLLEKLAQ

SEQ ID NO: 540 - DNA, 390 bp, Nanoarcheum equitans
atggcacgcgatatagttgcagatttcctatctcatttaactaatgtaagaagaaaaggagaagacaaaacagcatttttcccagtatctaatctaataataaaattagtagagataatgaaaagagaaggctatataaaaaattatagacttgttgatagttctcgcggtaaaataattgaaatagagttaagtgaatatttcaatgaagcaaatgcaatcaaaccaaggtttccagtagagtatagtgaattggaaaaatacgaaaaaagatatttaccagcattaaactttggtaggcttatcttatctacctctaaaggtttaatcacaaatagggaagcaaaagaacaaaaaattgggggagtattaatagcttatgtctattga

SEQ ID NO: 541 - protein, 129 aa, Nanoarcheum equitans
MARDIVADFLSHLTNVRRKGEDKTAFFPVSNLIIKLVEIMKREGYIKNYRLVDSSRGKIIEIELSEYFNEANAIKPRFPVEYSELEKYEKRYLPALNFGRLILSTSKGLITNREAKEQKIGGVLIAYVY

SEQ ID NO: 542 - DNA, 948 bp, Nanoarcheum equitans
atggttttaaaaaagaaagaaaaattagtttgccccaattgtgggagtgaaaatataatttacgatcctaaaaccggggagtatatttgtaaagactgtgggtatgttatcaaaatagaattcgatttaggcccagaatggaggcattttgatgatgaaactgttgatagaaggagaggaggagcaccattaagttatgccaaagtcggtaggggtctttctacagaaattggagatacctcggaaatatataaattgaaaggggaattaaaacaaaaattcatgagaatgagaaaatggcattctagagtggcgttgtccgcgatagatagaaatctaaagatagctttgcatgaattgaaaaagatggttgataaattaaatatgcccaaatatgttgaagaagaagccgctagaatctatcaaaaagttgtagaaaaaggtttggcgagggggagaaatataaatactttattagctggtacattatatttagttataagagaatataacattccaagaactttagaagaattggaaaaagccacaggtatatctaaaaaagatatagctaaagcctatagattaatagttagagaactaggcattaaaccaaaaccaattagtccagctgattttgtttatagatatgcaagcgaacttaatttacccccagaagtgactgctacagcaatagaaattatcgaagaagctaaaaagaaaaatattgtttccgggagaggccctcaaggtattgctgccgcagcattatatattgctgcgatcaaacatggaaaatatgtaccattaaagaaaataggggaaattgccaaagttacagaagttactataaaaaataggtacaaagaaataattaatagcttaggaatcgctgaagaaatagagaaaaaaagattgcaattagaaaactatgggattgaggattaa

SEQ ID NO: 543 - protein, 315 aa, Nanoarcheum equitans
MVLKKKEKLVCPNCGSENIIYDPKTGEYICKDCGYVIKIEFDLGPEWRHFDDETVDRRRGGAPLSYAKVGRGLSTEIGDTSEIYKLKGELKQKFMRMRKWHSRVALSAIDRNLKIALHELKKMVDKLNMPKYVEEEAARIYQKVVEKGLARGRNINTLLAGTLYLVIREYNIPRTLEELEKATGISKKDIAKAYRLIVRELGIKPKPISPADFVYRYASELNLPPEVTATAIEIIEEAKKKNIVSGRGPQGIAAAALYIAAIKHGKYVPLKKIGEIAKVTEVTIKNRYKEIINSLGIAEEIEKKRLQLENYGIED

SEQ ID NO: 544 - DNA, 378 bp, Nanoarcheum equitans
atggtattaaagattttgaagagaataagtaaaattgaagagcatatggaagagcccaatgaagagggttatattgaattaacagaaacaatcgaggaaatagaaccttctttgtatgttaaagtatatagaccaagggatttcgccgaaattagatatattttggacgatttaagggaaggtatctatatttgttttgttaatatatcttctctaaaaaacaaaagtagagaagcattaaaacacacattagaaaagatgaagaaaactgtagatgccattgggggagacattgcagtaacaacagatgattgggttattttaaccccgagaggtattaaaatttggagagagagtcaaccttctcagtcgcaataa

SEQ ID NO: 545 - protein, 125 aa, Nanoarcheum equitans
MVLKILKRISKIEEHMEEPNEEGYIELTETIEEIEPSLYVKVYRPRDFAEIRYILDDLREGIYICFVNISSLKNKSREALKHTLEKMKKTVDAIGGDIAVTTDDWVILTPRGIKIWRESQPSQSQ

SEQ ID NO: 546 - DNA, 861 bp, Nanoarcheum equitans
ttgttcggtttttattttaaagtgtatggggcattagctttattaatagcaatagcgctttttgctggctatttgtttatagatcctaatactagggaaaaaattagctctatcattgatgattatgttagctttgtttctagcggtatagaagaatggaaagctttagcgacaggggaatactatgaatataaacctatctatactacgaaaaaaaccgaggaaataaaaccactaatagttaatttgatagcccaatgcgatgggcctaaagaagttaatattaccgatacaaaattcgatataaatttgactgttaatgtggaagacccattttttgtgaaagaagtatcagttgaacatacagggttgtccgaatattatacaataaatgtagaaaaaaaggaaaacaaatgggcaattagctttactaaaaataaagatccaaaacctggttcttattcgataacttttttaataaagtatagcgcttattataaagaaatactgcccattttagtaaaaacaaaggatttcgattttgtccatatagatgtaaagccgtatttgcaatattatgttaaaccgaaaagctgggaagtgtataataatggagaactggaatttgtctttaccgatccaaatgcgcttattaatataagagaagctaaacttgcaatagaagggaatgggataaatatacaaaaaatggggttaaacaaaataaaaatttctttgcaaaacctaaaggcttatgcgataataccattatttattaatgcttctataacatatcaaaaatcgataactccaataggatgtacaataaacataaaaaatttaaataaccaacaaaattaa

SEQ ID NO: 547 - protein, 286 aa, Nanoarcheum equitans
  signal (1)..(34)
MFGFYFKVYGALALLIAIALFAGYLFIDPNTREKISSIIDDYVSFVSSGIEEWKALATGEYYEYKPIYTTKKTEEIKPLIVNLIAQCDGPKEVNITDTKFDINLTVNVEDPFFVKEVSVEHTGLSEYYTINVEKKENKWAISFTKNKDPKPGSYSITFLIKYSAYYKEILPILVKTKDFDFVHIDVKPYLQYYVKPKSWEVYNNGELEFVFTDPNALINIREAKLAIEGNGINIQKMGLNKIKISLQNLKAYAIIPLFINASITYQKSITPIGCTINIKNLNNQQN

SEQ ID NO: 548 - DNA, 495 bp, Nanoarcheum equitans
atgcctattgttgttagcaatgaagaagttaatgttagcccaaagcaaaagaaaatagtaatactaatgaaaaaaacattatatttggataaacccgaatacaaagcgtttgttgaagaattaagaaatttatatgctaaaggcctttttgatgatatattgattataagggaagatgaagacactttgtttaaactatatgaaaacgagtatgttgttgcatctttaaaagatttagaatatttaaaacaaaaggtaaacgccttagcgaaaacgatggttgaacaaaaggaaagtacgaacaaatttataaactatttgaaagatgaattgttttccattaaaggcaaaataatgtattttgaagacgaactaataaagcaaagagataccattaacgaattaaaaaaggtaaccaaaactataatcgatatggtaagaaaactatttgaaaaccaaaaattgttatctcttaaagcgcaattgaagcaataa

SEQ ID NO: 549 - protein, 164 aa, Nanoarcheum equitans
MPIVVSNEEVNVSPKQKKIVILMKKTLYLDKPEYKAFVEELRNLYAKGLFDDILIIREDEDTLFKLYENEYVVASLKDLEYLKQKVNALAKTMVEQKESTNKFINYLKDELFSIKGKIMYFEDELIKQRDTINELKKVTKTIIDMVRKLFENQKLLSLKAQLKQ

SEQ ID NO: 550 - DNA, 1428 bp, Nanoarcheum equitans
atgaacaaaagcgatatagttattttagcttttttctttgtttctttgggtttaggaatattaacattgctaccagcgaataccgttaaagaaacaacaaaaaaccaaaccgaattaaaagtatcaaaattaaaattgctaaatgtaactattgccaaaaataattattttagtattaatggggtggcagtaaacgaattagaaaggaagggcgaagtaacgcctatattatttaaggtttataattctagcaaaggcactgtatatatagataccgattcctataaagaaatctctttccaaaaatctattgctatagcaaaagaatttgtaaaatattttgttagaactaatttggataataaagatatcttaataaaattaaaagtggatagccccttcgtcgctggcgaaagtgccggtttaccattaactttaggattaatattcgcagcaaaagggtatgttccccaaaatttagataaatatgtttttactggagtgataatgccttttggtattattggagaggtaggaggaatagatttgaaatatttagctgcaactcaaaagggcaaaacattagtccatgggcaatcaacatttttagggggattatattatacggatgttctttccttatatagggatttgtttggaatagaattaatagagaaaaaacctattaaaataccaaggtggtatttagatataacaaagcaattggccgatgatttatgcaaaaaagctatagagcatggtttcaaagattcaaaagaatataaagtatatgaaaaagcttataaaaataaagattattatgctgctgcatcattatgtttcaaatatttatacgataatgttccaatagatacagatgtttattctttaatactagaaaccaggaaagagttaaacgatgcgataaaaaaggccaaaacattgtatgatgccgaagcaataggcgctgcgagggaaaggcttagaattgtaatagaattgtataacaaatatttggatactggtaataaagaattcttatacaaagcatattggcgtttgcaaacagtaaaaggttggttaaaatttgttggcaatactaccggtataaaaaattactgccctaaagaagtggtaaatgaaataaacaaaatttactctgctttcattggagaaaccgttgaaataccaaatagcatagattgctattatttggctaaagagtatatatctaatttgcactatagattatttagctatccatccaatgtttttgctttaataaaaatagcgccttattatttcgataggttcgatttggttggatattcctattaccaattaagcaaataccttaatgaggacaaactattatatataataaaagcgatagacttttcccacaattatttaacaaacaattcataa

SEQ ID NO: 551 - protein, 475 aa, Nanoarcheum equitans
  signal (1)..(30)
MNKSDIVILAFFFVSLGLGILTLLPANTVKETTKNQTELKVSKLKLLNVTIAKNNYFSINGVAVNELERKGEVTPILFKVYNSSKGTVYIDTDSYKEISFQKSIAIAKEFVKYFVRTNLDNKDILIKLKVDSPFVAGESAGLPLTLGLIFAAKGYVPQNLDKYVFTGVIMPFGIIGEVGGIDLKYLAATQKGKTLVHGQSTFLGGLYYTDVLSLYRDLFGIELIEKKPIKIPRWYLDITKQLADDLCKKAIEHGFKDSKEYKVYEKAYKNKDYYAAASLCFKYLYDNVPIDTDVYSLILETRKELNDAIKKAKTLYDAEAIGAARERLRIVIELYNKYLDTGNKEFLYKAYWRLQTVKGWLKFVGNTTGIKNYCPKEVVNEINKIYSAFIGETVEIPNSIDCYYLAKEYISNLHYRLFSYPSNVFALIKIAPYYFDRFDLVGYSYYQLSKYLNEDKLLYIIKAIDFSHNYLTNNS

SEQ ID NO: 552 - DNA, 699 bp, Nanoarcheum equitans
atgctattgctattagaattggtatttgctatactaatgttttttgcattgtataagccaatgcattatcatataacattggataagaaagagtttaatccaaatttttatgattatgaaaaagcaatagttctgtattattatgttaaagagcttaaaccaactgctttttttgcctttttcccaaaatgggttaattccatttacgccaatggggtaccggcttattataaaaaatattacccctatacgattccagtaaatgtggaaaaaaacatctctattaatattagcgctttaaattgcacttctgttttattatttgattcccattttaaaccggtattttacaattattctaacaataatataactttttcagcgaagagaggtacatactatctatattgcttagacatagagcaaaacttatataatacttcgatacaaccggaagaagagtataaaatagatttacagaagcaaaaaattttggttaaacctttgttttatgtttgttttaacccaacaatgaaaatgggcgaactaatattagaaactcaaactaggatagggcccaaatataattgtgccttaaacaatatagttgtaaccaataatatagatttgcccaatggggaaaatttgggtttcgaatcccaattaaaatacgaattttatgaattgtttgttaaataa

SEQ ID NO: 553 - protein, 232 aa, Nanoarcheum equitans
MLLLLELVFAILMFFALYKPMHYHITLDKKEFNPNFYDYEKAIVLYYYVKELKPTAFFAFFPKWVNSIYANGVPAYYKKYYPYTIPVNVEKNISINISALNCTSVLLFDSHFKPVFYNYSNNNITFSAKRGTYYLYCLDIEQNLYNTSIQPEEEYKIDLQKQKILVKPLFYVCFNPTMKMGELILETQTRIGPKYNCALNNIVVTNNIDLPNGENLGFESQLKYEFYELFVK

SEQ ID NO: 554 - DNA, 1974 bp, Nanoarcheum equitans
gtggaagaacttgagaagctagaattagaaaaatatctattgaaaaaaatgaatgaagcaaacgatatactatatatatcactaaaagagttagaagagttggggctaataaacctaatagatgaaatattggataaccctgaaaaagcaatagagcaaataaaaacaatagtaaaagaaatccaagaagaatatgctttaactaaagtagattactatatagcgtttactgatgtacaatattatagaaatgtaaagattagagagctaagaagccaccatttgaataaattagttgctatagaaggcattataaaacaatcttcaatggttaaaccagtactaaaaagggccgtttttagacatagctgtggttacgaagtagaaaaagagataaaaagtattagcgataaaatttctaagccaaagaaatgtcccaaatgtaataaatctggcgattgggagatagtagaagaagaatacattgatatacaaagattagttttagaggaattaccagaaaaccttactgggggagcccaacccgagagggttactgccatattaaaggacaaactagttgaaccgaaaattaatgataaaactgttcctggagcgagagttagaatagtaggaataccaaggaccgcaaagcttacagagaaaggcgctatctatgatatactaatagaagtaaacaacatagaatttttagagaaaaacataacagatatagttatcactaacaaagatttggtagaaataaaagagatagccaatagcaataacccattagatttattggtggagaattttgccccttctatatttggttatgattacattaaaaaagctatccttttacaaatggttgggggtgttaaaaaaattagaagggacggcacaaaagttagagggcatatacatatattattagtaggagatcccggtacagcgaagagcactctattaaaatatgctgcagaagtagcgccaagaggtagatatgtctcaggcacttctgctacagctgttggtttagtagcggtagtagtaagggacgaactattgaaagtatggtctatcgatgcagggccaatggttttagctaatggcggtttattagctttagacgaaatagagaaactaggtaaaaacgagctaatgattttacacgaagcaatggagcaaggtagtgtaaccattagcaaagccggtatacatgttacattgaaaacagaaacatctgttttagccgcagcaaatcccaaatttggaaggtgggatgataatttgtctttagtagaacaaatagctattcctccaactatactaaataggttcgatttaatatttctaataagagataaacctggaaaagattatgatgaacaattggcagaaagggtattagaaagttatgttgaagatgtagatttggcaatacctgttgatttgttaagaaagtatatcctatatgtgagaaaaaacataaaacctaggctttccaatgaggctatagctagaattaaggatttctttgtctctctcagagagaaatctcaagagttaaaagcagttccaatctctacaaggcaattagaatccattgtaaggctagctgaggcatctgctagaataaggttttccgatatagttgaaaaagaagatgccgatttggctatagagttaaccaagcgtttcttagaggaagcaggagtagacccagaatccaaagtaatagacataacaatattagagagtggtaaaccaagaagcaaaatagaaaaacaaaaattgctattacaactaataaagcaattagatagcggggaaggtgttagcgagaaagagttaatagaaaaagccaaggaatatggtcttatggatagtgagatagagcaattgttatactatctaaaaactagcggggcagtatttgagattaaacctggcatattaaaagcggtataa

SEQ ID NO: 555 - protein, 657 aa, Nanoarcheum equitans
MEELEKLELEKYLLKKMNEANDILYISLKELEELGLINLIDEILDNPEKAIEQIKTIVKEIQEEYALTKVDYYIAFTDVQYYRNVKIRELRSHHLNKLVAIEGIIKQSSMVKPVLKRAVFRHSCGYEVEKEIKSISDKISKPKKCPKCNKSGDWEIVEEEYIDIQRLVLEELPENLTGGAQPERVTAILKDKLVEPKINDKTVPGARVRIVGIPRTAKLTEKGAIYDILIEVNNIEFLEKNITDIVITNKDLVEIKEIANSNNPLDLLVENFAPSIFGYDYIKKAILLQMVGGVKKIRRDGTKVRGHIHILLVGDPGTAKSTLLKYAAEVAPRGRYVSGTSATAVGLVAVVVRDELLKVWSIDAGPMVLANGGLLALDEIEKLGKNELMILHEAMEQGSVTISKAGIHVTLKTETSVLAAANPKFGRWDDNLSLVEQIAIPPTILNRFDLIFLIRDKPGKDYDEQLAERVLESYVEDVDLAIPVDLLRKYILYVRKNIKPRLSNEAIARIKDFFVSLREKSQELKAVPISTRQLESIVRLAEASARIRFSDIVEKEDADLAIELTKRFLEEAGVDPESKVIDITILESGKPRSKIEKQKLLLQLIKQLDSGEGVSEKELIEKAKEYGLMDSEIEQLLYYLKTSGAVFEIKPGILKAV

SEQ ID NO: 556 - DNA, 807 bp, Nanoarcheum equitans
atgaaaatggacaaactaaaatacaaagttttagacactataaaaagatattctcttttttcccccaacgaaaaattgttattagccatctctggaggcaaagattcggtaactttgttagacatactttataatttaaattacaaattcgatctatattttattgatttaggaataaagggtttttctgatatttctgagaaaatagttgagagtttatcaaaagaatatgggttaaacctatatatagatagggtagcagattatgggattactataaagcctataggcaaaatgccagcttgcgctgtatgtggaatagtaaagagataccttatgaataagtttgcatatgaaaaggattatactttgattacagcgcataattttgatgatatcatagcttttgctttagctaatctgttttctggtaattatgaatatttgttaaaaataagacccaaaaatgaaagatattataaattggctaaaaaggttaaacctttgttttttgtaagagaaaaagaaaccttgcaatatgttaaggaaaagaatttgccatatgtaaatatagaatgtcctttaaggagaaagaatacccaagatagatacaaaaatatagctaatgaatttgagaaaatattccctgggtttaagaaaaattttataaaagctttgctatactataatactagagtgccagagccaaagccaaagaattattgcaaaatatgtggttacccatcaaagggagaagtatgctctttttgtaggataagaaatgcattgtcaagacataataaataa

SEQ ID NO: 557 - protein, 268 aa, Nanoarcheum equitans
MKMDKLKYKVLDTIKRYSLFSPNEKLLLAISGGKDSVTLLDILYNLNYKFDLYFIDLGIKGFSDISEKIVESLSKEYGLNLYIDRVADYGITIKPIGKMPACAVCGIVKRYLMNKFAYEKDYTLITAHNFDDIIAFALANLFSGNYEYLLKIRPKNERYYKLAKKVKPLFFVREKETLQYVKEKNLPYVNIECPLRRKNTQDRYKNIANEFEKIFPGFKKNFIKALLYYNTRVPEPKPKNYCKICGYPSKGEVCSFCRIRNALSRHNK

SEQ ID NO: 558 - DNA, 513 bp, Nanoarcheum equitans
atgcattgtcaagacataataaataaaattataataaatagaattataagggaattgttattacctaaattagacggttttagcataataagtttatcgaaatacgattttatcgatttatttttgttgagcgctttaaagaatgggcgatattatgtatataacaaagagatcgatttaaaattcccatataaattggttaaagccaacaaaacatacaaagtttacaaaattatcccaaccaatacgaaggtttattttattaaaaaatctatatttgatgttagacccaaagaaaaagcagatttggctattgttatagagcagaactataataaaaaattgcacaatagaataaaacaattggctaaacatttaattttgtacgatatagtttatgataaaaagaaatgtataaaaataggtataaagaacataatatttgaaaatttatactgctgttacaaaaatagaaaaaccctagttagcctcgtcgggttttatgaattgtaa

SEQ ID NO: 559 - protein, 170 aa, Nanoarcheum equitans
MHCQDIINKIIINRIIRELLLPKLDGFSIISLSKYDFIDLFLLSALKNGRYYVYNKEIDLKFPYKLVKANKTYKVYKIIPTNTKVYFIKKSIFDVRPKEKADLAIVIEQNYNKKLHNRIKQLAKHLILYDIVYDKKKCIKIGIKNIIFENLYCCYKNRKTLVSLVGFYEL

SEQ ID NO: 560 - DNA, 1821 bp, Nanoarcheum equitans
gtgattccatggcatgccaaaatttattattacattacaaattttttgtcttatttgcctctaccttctttccttaatgaaaaagagaaagaaaaaataaaattttatgcatgggaattgggcttagaaatagatccaaacaatgttggaaaagcttctttgttttttatattgctcgcaatggtttctgcgattgtttctttattcaatataaacttcatttttttgactttaatatttttgtttttggctttgtatgtttattattatccaattattgttggtaaaagctatagaaccaaaaaagaaacacaatttcttttgtttttgcttaatgtagcaatgttttatgaagttttgcctagtattgatttagcaatatataatagtgcgaagcatttgcctttccctataaaattggacatagaaaggctattatggtataccaacttaaggtatttcgaatctattagtgacgccctagagttttatgcaaaaagatggaaagaaaacacaacaataactcaagcattgttcatcctaataaacaaaaacccgaaagaggcattatcctattatttggagcaaagctactatagaatgctatcttttagccgagagctaaagagttctgtcgaaataataaatatgataggtatagtattaccgataatgaccatgactttattaccagtaataatcggaattcttgcatcggaagtgccttacatttatttgttcatattttatgatatagttttgccaaccatattgctaatactatctaaatttgttatagagaaaaaggttcctcccaccatatttagttataatcccggaaaaaggcaatatcggttattaatattagttccattgtttttcttatggttaataatatttcttaacgcatcgagccattataaagaatacaaaatgtttaatagtattgtttctttagcttacacatttttgttagttttgtttttgctaattgggtttgcattgtattttattgatatttattctctttacaacaaaattaaaaaaatggttaaccaattaataatatttttggaaacactaaaaagttatgtctctttaggttatagcttagaaagggcattaagcttaacatcaaaaaaattgcaaggcttagaaatagctgagctattatataatatagaaaacaaaatcaatgagaataaaccattggatattgcagtaaaagaagcattaaaaaaatacaacaatcctataatagagacaatattcgatattattatagccaactataataaaggtttaacatctttatcagaattattagattctttgttagactatcttagaaaggttaacgctgctttagagagaactaaggatttgcttagcgaagctattagcgagatgaagatgcaaataataatgctaatcccagtaatgttgggcataatcgttggtataggtaactttatgatatctattatgcttttaattaccaacataatgaaatcattcgattttaaaagtgctggtcaattttctattcctttggatgttttgcaaatgtttatgataaagaaagagacaataaatccttttatgtaccaagctttagttgggttatatgttatagcatcagtaataattctatctattttgcttaatagtatagaaaattcaaaagacccaataagcgaaaaaatagttattgtgaaaaatttagccatagcttttgctatatattccattatagtaataattactataaccttattccaaggcctatatgaaatgctaaaaatgtctttgtttagctaa

SEQ ID NO: 561 - protein, 606 aa, Nanoarcheum equitans
MIPWHAKIYYYITNFLSYLPLPSFLNEKEKEKIKFYAWELGLEIDPNNVGKASLFFILLAMVSAIVSLFNINFIFLTLIFLFLALYVYYYPIIVGKSYRTKKETQFLLFLLNVAMFYEVLPSIDLAIYNSAKHLPFPIKLDIERLLWYTNLRYFESISDALEFYAKRWKENTTITQALFILINKNPKEALSYYLEQSYYRMLSFSRELKSSVEIINMIGIVLPIMTMTLLPVIIGILASEVPYIYLFIFYDIVLPTILLILSKFVIEKKVPPTIFSYNPGKRQYRLLILVPLFFLWLIIFLNASSHYKEYKMFNSIVSLAYTFLLVLFLLIGFALYFIDIYSLYNKIKKMVNQLIIFLETLKSYVSLGYSLERALSLTSKKLQGLEIAELLYNIENKINENKPLDIAVKEALKKYNNPIIETIFDIIIANYNKGLTSLSELLDSLLDYLRKVNAALERTKDLLSEAISEMKMQIIMLIPVMLGIIVGIGNFMISIMLLITNIMKSFDFKSAGQFSIPLDVLQMFMIKKETINPFMYQALVGLYVIASVIILSILLNSIENSKDPISEKIVIVKNLAIAFAIYSIIVIITITLFQGLYEMLKMSLFS

SEQ ID NO: 562 - DNA, 249 bp, Nanoarcheum equitans
atgccagcaaaaagagacaggggtatcccattagcagcagtcgagagaatattaaaggaggaagcaaaaaaggtcggagtaacaagagtatccgacaaagcagttaggttattgaaagagaaattagaacaaatctatgcagagatcgccaaagaggctttaaaattagcaacacacgctaaaagaaaaacaatcaaaaaagaagatgttttaaatgcagcaaaggtagtagttaaaaatttagtctaa

SEQ ID NO: 563 - protein, 82 aa, Nanoarcheum equitans
MPAKRDRGIPLAAVERILKEEAKKVGVTRVSDKAVRLLKEKLEQIYAEIAKEALKLATHAKRKTIKKEDVLNAAKVVVKNLV

SEQ ID NO: 564 - DNA, 309 bp, Nanoarcheum equitans
atgatgaaagtttatctaaaaatggatcctttaattatggcaggtatagcattaattatagcatggttaatactacaatggtctgaacccttaataaaatatttattattattgattttatttgttttggtttatgactttatagttaatggagacacatctactgcggctttcttaacttcctttataagtaaaacagtaaacaaagccgttgttatattgcaaaacctgtcaaagaccaatagtacagaaataataaataatctaaccaataccactcctatattgttattgattaggaaaaaataa

SEQ ID NO: 565 - protein, 102 aa, Nanoarcheum equitans
MMKVYLKMDPLIMAGIALIIAWLILQWSEPLIKYLLLLILFVLVYDFIVNGDTSTAAFLTSFISKTVNKAVVILQNLSKTNSTEIINNLTNTTPILLLIRKK

SEQ ID NO: 566 - DNA, 360 bp, Nanoarcheum equitans
atggagtattttacatacccattattgttggggttaatagtttttacctttactatagcagttaaccaaattataataccccaaatgttagaaataagacaatcctattattctatcccatttctatcaataaaactagaaaataacaatttaatattggaatcgatgtacgggaaaaccaatatgaaaaacattttcgtttttgttactaacaatactataccaatttgtgggacttatttagatggcataaaaaataaagctgtaattgatgttaatgaattgggatgtataggaaaatatgtttgcgtaagctatagggacaaaatactaaaatgtttattttttcctaatcaataa

SEQ ID NO: 567 - protein, 119 aa, Nanoarcheum equitans
MEYFTYPLLLGLIVFTFTIAVNQIIIPQMLEIRQSYYSIPFLSIKLENNNLILESMYGKTNMKNIFVFVTNNTIPICGTYLDGIKNKAVIDVNELGCIGKYVCVSYRDKILKCLFFPNQ

SEQ ID NO: 568 - DNA, 4173 bp, Nanoarcheum equitans
ttgatacctccattagatagcataataataaatgttccaaaagatgcaaatggacaaaacataaaaatcgctttaataactacaggttttaaccattcgctttatgaaaaattaaaaagccaatataatttaaacgacgaaaatataagactattctattgcttaggaagcgataaagtagatataaataattggggcacatatagtgcagcaataataaaaagtatcgccccaaatgtctcattagacatatacgattgcgattattctaataaaatgttagatgtaactaaattaaatttatcgaaatatgatttagttgtagtcacattaaattacaatacccccttcgatgattgttctgataaaatatgtaaatttttatctaaattcccaacaattgcctctgcaggattcgctatacatggaacccctggaaagggttatagtaatataaaaataaacgtagatacagcaaaatatggaacagatgtggcattatacaatgcaacaatccaaatagttagcgcaaaagatgttagtgttctattccctacaaattgttgttattctatagaaagcccaaaggagaaagcaataacttgtaggatacaatccatgtatattgatgagccctgctattacgatggcaaaaagaaaacgataaatctaacaataaataccaattatgcttggaaactaaaaattatcgaacatcaaagccctacttattcagatgtattatatttagataacgaagattataattatactctccaatctccttgttttgctaaaatatgtgttgttggtttagatggatacaaggttttaaccgcacaaggtcctactttgctgggccaaaaccccactttatcggcccaatctaaatttgattttggtttctatcctggttacgccgcagctgtaacagcaggagcaatagctttgttaatgcaatattttaatctaacattggacgaaataaatatagattggatcgtaaatcctaaaaagcccgcgtatctctatggaaaaggcatactatatttagattttaataaattgcttaaacctaaaatcgatgtatctatagaaaaatgctaccaatccaattgcaaaataaaagtagaaagcgacattccattaaaagtttgtgttgaagatgattgtaaatttgtaaataaatcctacgaatttaatttgcaattcccattctatggaaatacaacaatagatgttaaagcctacataggaaacaaacttgtatataaatatagtaaagaagtttatgtagaaaaagacccattaaacataaaagcggtatatgttgatcccgacaatataagaaagggcgaaaaaaccaatatattcattataggacaaggcaaaaacatcgatatctatatagatggaatatactatagaacaatagatttaaatgggtcttattctatcgaatataccccaactaaaacccctatagaaataaaaataagaaaggacaattttgaaaaaacatttagtattccaataatatttgttaataaacccaaagatttgaatggttccttatatttagcaattccatatggggattgcaatcaatttatgtttaaccaaactttttattgcgatggcgataatttatataaactaatccctatagatagccagcttctaagctatgtaaatgatacgattaaagttttcgtatacaaaggaattaacgaatatggaataaaagaattgcaaattcaaagcaataattatactaccatattacctttcggcgaatacaaagatggtaaactatgtgtagaaaattattgctttaggtttaactatttacctcaaaaggttataactaaaatagagaacaatactttacaaatcattactaatcagccataccctatagaaataaaaatcaataacgaaacttatatagtcaaaggaaatagtactataaaatttactccaagaattggattaaaccttattgagatcaaatacaaagatggccataaggttataccttattattactatgaaaagccaagaatagaatacaaattcgatgggcattatttgtatttgaaagcttctcacaaagataccatttttgttatagtaaataacaaaaagttaaaggtaaatgtatccaaagaatggtcgaaaattgatgttagcccttatttgataaaaggcctaaatattatacatattttaggttattacaagcacacaatattatatgatggaaagcaaataagatatttcgattattatcaatacgatgtgcctgcaatagagttaaaacttaatggaaaaataaaaggcaaaataaaagtgataccaacctacttggttaactttaattacacaataaaggggaataaagttacaataaaatcagatcctttctttgctaaggtataccacaatggtaaactaatttatgttggaataatagagaataatacttttccgattccagtaaaaatagaaaacggcgatgttttaataacaatacctggaaaaatagaatacaaaaacattagcataaaatacggggtattctataataaatcgctattgggagaaaaattgttagaaaactacctaaatgggttaggaatatacaataaattatattatgaaaaaccctatttgtataaagttaaatggctatgttatggggagacaaataatatagcatgtaacataaatcctttgcaatataaaaaattcgatccaatcccaaaaaaagaccaagttccttttggaaattattctataaaattaattagaaaagtaaacctaatagttactgcatgtaaaagcgtttgcacttctataaaaagagagattaatttagatataccaacgatgtacagttttaacttagacaagggctggtatatgggaaaaccaaacattagaatagatgataatttatatatagatactaacaacgatttcaaacccgatataacattaagggaaggagaaagcaggataataaataacaaaatattctatttcaacaaaaccttatatattgggataaaaaccaaacctggattttatattgtaaatgattccatagtagtaggggaatacaaatttgtaataccaacattctttactgctatatataataaaggttacataaagaaatattttaccaaaagagacataatatatttggataggcctatatatattaaacctcagtcctggactttagatataaaaaaggcaaacaataccataattgggaatacagataattacattactgtatataataaagacatctatttcaaaataaagggacaatttaaactacatttggatggttttagctatatagaagaggcgaatagcaaaatatttcctttctatataattggaaataaattgtatttatcgaaaggccgatacgaagtttatgcaaacaaccaatatgtgggggagtttaatattaattatcctataccaataggcaatacttccaatgtatacaaaattatagatttagacagcgatgcaatattatatttttacaacaatagttatatatttttgcccaaagatgtttttatagctttcgatttagagaacaatatttctatccctatgctagctaaatgcgataataattatatccctatctatattaaaccacaaaaacttaattgttctaaattggatacccccttgtttacatgggacaaaactttaaaatctaaaataaaacctatattcaatacaaggtttgcctatatattttacgcagccaataaaaaaccatatatagaggtagaaggcgttaaaatttatataaacaatggtttaaccatagaaggggggattattgttaatgacaacaaaacctatattgggaaagcccaaataaaagaaggccatgtgatggtaataaaaaataataaattagttttcgaaacgtttttaccttatactagaatacaaaaaacagaaatagaacaaagcaaaaacgaaaaaccaaaagcgaaacccataaagaaaacaaaaagggagttcaattcctttgccattataataataggaacggcattattcttaatattaatagcatggctccgcagaaagaagaaacaacaatacccctataaagagatataa

SEQ ID NO: 569 - protein, 1390 aa, Nanoarcheum equitans
MIPPLDSIIINVPKDANGQNIKIALITTGFNHSLYEKLKSQYNLNDENIRLFYCLGSDKVDINNWGTYSAAIIKSIAPNVSLDIYDCDYSNKMLDVTKLNLSKYDLVVVTLNYNTPFDDCSDKICKFLSKFPTIASAGFAIHGTPGKGYSNIKINVDTAKYGTDVALYNATIQIVSAKDVSVLFPTNCCYSIESPKEKAITCRIQSMYIDEPCYYDGKKKTINLTINTNYAWKLKIIEHQSPTYSDVLYLDNEDYNYTLQSPCFAKICVVGLDGYKVLTAQGPTLLGQNPTLSAQSKFDFGFYPGYAAAVTAGAIALLMQYFNLTLDEINIDWIVNPKKPAYLYGKGILYLDFNKLLKPKIDVSIEKCYQSNCKIKVESDIPLKVCVEDDCKFVNKSYEFNLQFPFYGNTTIDVKAYIGNKLVYKYSKEVYVEKDPLNIKAVYVDPDNIRKGEKTNIFIIGQGKNIDIYIDGIYYRTIDLNGSYSIEYTPTKTPIEIKIRKDNFEKTFSIPIIFVNKPKDLNGSLYLAIPYGDCNQFMFNQTFYCDGDNLYKLIPIDSQLLSYVNDTIKVFVYKGINEYGIKELQIQSNNYTTILPFGEYKDGKLCVENYCFRFNYLPQKVITKIENNTLQIITNQPYPIEIKINNETYIVKGNSTIKFTPRIGLNLIEIKYKDGHKVIPYYYYEKPRIEYKFDGHYLYLKASHKDTIFVIVNNKKLKVNVSKEWSKIDVSPYLIKGLNIIHILGYYKHTILYDGKQIRYFDYYQYDVPAIELKLNGKIKGKIKVIPTYLVNFNYTIKGNKVTIKSDPFFAKVYHNGKLIYVGIIENNTFPIPVKIENGDVLITIPGKIEYKNISIKYGVFYNKSLLGEKLLENYLNGLGIYNKLYYEKPYLYKVKWLCYGETNNIACNINPLQYKKFDPIPKKDQVPFGNYSIKLIRKVNLIVTACKSVCTSIKREINLDIPTMYSFNLDKGWYMGKPNIRIDDNLYIDTNNDFKPDITLREGESRIINNKIFYFNKTLYIGIKTKPGFYIVNDSIVVGEYKFVIPTFFTAIYNKGYIKKYFTKRDIIYLDRPIYIKPQSWTLDIKKANNTIIGNTDNYITVYNKDIYFKIKGQFKLHLDGFSYIEEANSKIFPFYIIGNKLYLSKGRYEVYANNQYVGEFNINYPIPIGNTSNVYKIIDLDSDAILYFYNNSYIFLPKDVFIAFDLENNISIPMLAKCDNNYIPIYIKPQKLNCSKLDTPLFTWDKTLKSKIKPIFNTRFAYIFYAANKKPYIEVEGVKIYINNGLTIEGGIIVNDNKTYIGKAQIKEGHVMVIKNNKLVFETFLPYTRIQKTEIEQSKNEKPKAKPIKKTKREFNSFAIIIIGTALFLILIAWLRRKKKQQYPYKEI

SEQ ID NO: 570 - DNA, 165 bp, Nanoarcheum equitans
atgcctatagatttaggggaaatagttttagcattaactagagaggaattgttcgataaaatattagaatataatgataaagtaatagccctagagctaaaagattatagcccatatatagagaacatagttaaaaaagatacatctccaaagaaaagagcttga

SEQ ID NO: 571 - protein, 54 aa, Nanoarcheum equitans
MPIDLGEIVLALTREELFDKILEYNDKVIALELKDYSPYIENIVKKDTSPKKRA

SEQ ID NO: 572 - DNA, 1125 bp, Nanoarcheum equitans
atgcgaattaaggaaaagcctgaggattttgttgttattgaaaaaactaatttttctatagcggaaccatcgaaatattatgatcaattcaaatttatgggaataaaagataatggaattcctggggattatactatttatgttttgaaaaagaaaaatttatcaacaactcaagcaataaagataatagcaaaacaatttcgtttgtctaaatatagaatatccttttctggggaaaaggacaaaaaagctataacttatcaattgatttctatatataaagggcccaaaaaatctatgtttttagataatttagaattatactatatagggcttagcgataaaccagtaaaattgggttcccatttagggaattattttgaaataaaagtttatgcagaatccccaaaggggtttgatgtttttccaaactattttgatgtccaaagatttggagacaaaagattagtaaaccatctaataggcaaacatttaataaaaaacgaatgcgaggaagctgctaaaattttattaacatttgttggaaaagaaagtaaaaaaacaataaaagttaggcaattaataaaagaatattggaataatatagaaaagctaaagaaagttattccattaatgccaaaagccctagatatagaaaaagcctatttgcaatcctttattgagaaaaaagactattgtaaagcgttcaaagctatcccaaaatggattttaatgttatttatacattcgtaccaatcttatatatttaatgaaacccttaagatgtatctaaaaaacaaaacaaaaataatcaaaataagagatttattggaattctattttgcagactattatgaaaacatagagattccattaattgggtataaagttaatgccaaaggcgaaataaaagaaataatagattatttattagataaagaaggcattactattgagatgctaaaaaataaaaaagttgttggcacttatagaaagggctttcaaaagatgtatgatttgaaaataaagaaaaaccaaaaatggttaactaaattctatctagaaaagggttcctacgccacagtagcgattaggtctttatttttagagcccatcgatttttaa

SEQ ID NO: 573 - protein, 374 aa, Nanoarcheum equitans
MRIKEKPEDFVVIEKTNFSIAEPSKYYDQFKFMGIKDNGIPGDYTIYVLKKKNLSTTQAIKIIAKQFRLSKYRISFSGEKDKKAITYQLISIYKGPKKSMFLDNLELYYIGLSDKPVKLGSHLGNYFEIKVYAESPKGFDVFPNYFDVQRFGDKRLVNHLIGKHLIKNECEEAAKILLTFVGKESKKTIKVRQLIKEYWNNIEKLKKVIPLMPKALDIEKAYLQSFIEKKDYCKAFKAIPKWILMLFIHSYQSYIFNETLKMYLKNKTKIIKIRDLLEFYFADYYENIEIPLIGYKVNAKGEIKEIIDYLLDKEGITIEMLKNKKVVGTYRKGFQKMYDLKIKKNQKWLTKFYLEKGSYATVAIRSLFLEPIDF

SEQ ID NO: 574 - DNA, 1131 bp, Nanoarcheum equitans
atgattgtattgtatagcgggggtaaagattctaattatgctttagttaaagctttagaccatggttataaaattagaaaactcatatccatcaaaccagataatgcttttagctctatgtatcattacccagccatagagataaccaaaactcaagcagagctattagatttaccattagacttatatttcgtaaaagaggaagagaagttctctaaattaaaagaaatactagagatggaaaagcccaaagccattattacaggggctatcgcttctgcataccaagcaggcaatataaataaaatagcttatgaattaaatatatatgtacatagcccctcttggttaactccatataaattatacttaaaccaattaaaagagagatgctttgaaataatcattagcagggtttcttcttatggactaaaaaaagaatgggtcggtaaaaaccttttcgaagtaatagaaaaagcccagtatattaatttagttggcgagggcggagaatatgaaagcttagttctataccaaccatattttaaagggaaaattgttatagaccgatataaaataaaagttatcgatgaatacactgcagatattgttatagaggattatcatattgagcaatataaaaagcattgccccaaaaaagatctaaaattggaaggaaacaaaaccctaataatagatatgacagacaatattttgtctttctacgaatatgttatgcctatatattaccaaaccaaaggcacaatcattaattataaacaaataaataaaatagatttagacgaattcgataaaataatagttagctcttttccccccattgagaaaaaatattttaacatagattttaacaaaccaactatagttattgggaattcggtccaatttttagatgtggatttggtagaaaaaccaaccttcgggttaaatcaaataaaactaaacaataaaataacaaatgcttatttcctagcgaagtacttagttaaaaacgctaatgggtttgccaaacttaataattatgatgtgggatttagaataaaagacattacagcttatatatttaaccccgagtataatgcctttgtttatggagaaaaactcttttaa

SEQ ID NO: 575 - protein, 376 aa, Nanoarcheum equitans
MIVLYSGGKDSNYALVKALDHGYKIRKLISIKPDNAFSSMYHYPAIEITKTQAELLDLPLDLYFVKEEEKFSKLKEILEMEKPKAIITGAIASAYQAGNINKIAYELNIYVHSPSWLTPYKLYLNQLKERCFEIIISRVSSYGLKKEWVGKNLFEVIEKAQYINLVGEGGEYESLVLYQPYFKGKIVIDRYKIKVIDEYTADIVIEDYHIEQYKKHCPKKDLKLEGNKTLIIDMTDNILSFYEYVMPIYYQTKGTIINYKQINKIDLDEFDKIIVSSFPPIEKKYFNIDFNKPTIVIGNSVQFLDVDLVEKPTFGLNQIKLNNKITNAYFLAKYLVKNANGFAKLNNYDVGFRIKDITAYIFNPEYNAFVYGEKLF

SEQ ID NO: 576 - DNA, 873 bp, Nanoarcheum equitans
atgctcgaccgctataagtttattcctaaatataatgattttcttagactattaaaccaaaagaggcccttatttattagggttaacactctaaggggagatgaagaatttatagtaaaaatgctagaaaatagaggtttcgagttagagagtacgccattaaaatatttctataaaataaaaaaagccccatttcatttacaagcattacccgaatacattttaggtctaatatatatccaaaatccctcttcagctttgccagttttcgctttgtctccaagaaaaaaagatattatattagatatggctgccgctcccgggggaaaatcctctttaatacaacaattaactaacaatcaatctattttgtatagtgtagagaaagacccttttagggctaaaaagatgcgatttatttttgataggctaaatgtaagagcagtaataattaatgaagatgctttaaaattaccatttaaagaggaatttaaaaaaattttattagatgcgccttgttcagccaatccctatatagataaaaccttcatttcaaaaaccatagaggattttataaatagacaaactatacaaaaacaattaataaaaaaggcctatgaaatgttaaaaccaaatggtattttagtttattccacatgcacattagagcccctggaaaatgaattcgtaatagaatatgctctctctttagggtttaagatagttaatgccaacctatttggagagccagcattaacaagttttgaaaaccatgaatttccaaaagaaatgcaatattgcaaaaggatatatccccatatacattatgggtttgaaccatttttttattgtgttctaaaaaaacctaaatga

SEQ ID NO: 577 - protein, 290 aa, Nanoarcheum equitans
MLDRYKFIPKYNDFLRLLNQKRPLFIRVNTLRGDEEFIVKMLENRGFELESTPLKYFYKIKKAPFHLQALPEYILGLIYIQNPSSALPVFALSPRKKDIILDMAAAPGGKSSLIQQLTNNQSILYSVEKDPFRAKKMRFIFDRLNVRAVIINEDALKLPFKEEFKKILLDAPCSANPYIDKTFISKTIEDFINRQTIQKQLIKKAYEMLKPNGILVYSTCTLEPLENEFVIEYALSLGFKIVNANLFGEPALTSFENHEFPKEMQYCKRIYPHIHYGFEPFFYCVLKKPK

SEQ ID NO: 578 - DNA, 252 bp, Nanoarcheum equitans
atgaaagatagaattatctatagaagaacccctggaggaagggttactgttttatataaaagaaggaaaccttccccagcaaaatgtgctatatgtgggagaccattacaaggagtagtaagagaaccagcttattggttaaaaagtgaaccaaagcaaagaaaaaaagtatctagaaaatttgggggttatttgtgccacgaatgtgctagaagagttatagcgagaatggcaagaaattttgaactataa

SEQ ID NO: 579 - protein, 83 aa, Nanoarcheum equitans
MKDRIIYRRTPGGRVTVLYKRRKPSPAKCAICGRPLQGVVREPAYWLKSEPKQRKKVSRKFGGYLCHECARRVIARMARNFEL

SEQ ID NO: 580 - DNA, 459 bp, Nanoarcheum equitans
atgattagctttgttataactttcttcacttctttcctaatgcttttattttttataatagatattgttttaggaaagcaatctatctttgattttcctaagctttttaagaaaatatatttaatgttttatttggctttcgtggtttttattgtttcctttatagttaaattggcaaaactttatttgttttataaaggaatacactttagtttttgtcctccctttattatactgcttacttcttatatagtaacgctaatagctttgtttataatttttgttcaatccaaaatacctataataagagaaatgtcctttttggcttttacaaaagatgtattgccttcctttattaaaaacacattagtaaggaaatccttaattgttgtgatattaatggtattatctatagttttttgctttatagttcaaaatttcttgccattctcgctataa

SEQ ID NO: 581 - protein, 152 aa, Nanoarcheum equitans
MISFVITFFTSFLMLLFFIIDIVLGKQSIFDFPKLFKKIYLMFYLAFVVFIVSFIVKLAKLYLFYKGIHFSFCPPFIILLTSYIVTLIALFIIFVQSKIPIIREMSFLAFTKDVLPSFIKNTLVRKSLIVVILMVLSIVFCFIVQNFLPFSL

SEQ ID NO: 582 - DNA, 690 bp, Nanoarcheum equitans
atgttcctgctaactaaacatgctaaagaaaaaataaagaaaaggctattaaagaaaaaggatgtaaaccctatagaattatggaaaaaagctatagagtttgcccaaaactctatagaaagagtaggcgattttatttattacactaatgggcaatacactttaatagtaaccaaagaccaaaaatcgcaaacgaaagaagagtttattaaaaatataagccaatcaaaatacaaatatttttatgtttattgggatggcgatattaaatatatgcctaagcatgaagttttattattaaaagggtatgcccaaaagaatagccccgatgtttatattggtaaccctagaatagccataacacttagaccttttaagaaaagtgatttgttccctatgatacataggctaacaataaagaaaaaatggttagacaaactattaaaaggagaaaaggaatacgaggttagaaatcaaattcccaaaaacttagcagttaacgatattattgaattctacgacaaaaagaagaaagtatcgcacaaatttagagtattagaaataaaatatgtccctttggaggaagcgctaaaatataaaataggtatatctaaatcagtattatttcaattggccaaaaaagactatgtgtatcttttaaagttagagcctttggacaaaaatgattag

SEQ ID NO: 583 - protein, 229 aa, Nanoarcheum equitans
MFLLTKHAKEKIKKRLLKKKDVNPIELWKKAIEFAQNSIERVGDFIYYTNGQYTLIVTKDQKSQTKEEFIKNISQSKYKYFYVYWDGDIKYMPKHEVLLLKGYAQKNSPDVYIGNPRIAITLRPFKKSDLFPMIHRLTIKKKWLDKLLKGEKEYEVRNQIPKNLAVNDIIEFYDKKKKVSHKFRVLEIKYVPLEEALKYKIGISKSVLFQLAKKDYVYLLKLEPLDKND

SEQ ID NO: 584 - DNA, 1725 bp, Nanoarcheum equitans
ttgatccaaatgcgtattgccataatagatagaactaaatgtaagcctaacaaatgtaactacgaatgctacaatttttgccctttaaatagggcaggaaagaaatgtatagaaataatcgatggcaaacctgtaatcgatgaatctatttgtattggatgtgggttatgtgttaaaaaatgcccattcaaagccataaaaataattaatgtcccagaagcgaagggcgaagtcgtatttcaatatgggcctaactcttttaggttgttttccttgccaatagtaaagatgggcaaatctataggaattttagggcccaatggaataggaaaaactacagctataaaaatattgagtgggcaactaaaaccaaatttcggcgattataataaagaatatagctgggaagagataatagaaaaattcaaaggtacagaattgcaaaactattttgaattgttatctaaagggcaaataaaggttatacataaaatacaagaaatacaaaaacttagagaggtttttaagggtaaaaccgttagagagctaataaaattggataacccgttattgaaagaattcggcttagacaaaatattagacagaaaaatagaaaaccttagcgggggagaactgcaaaaactattgatttatgcctctttatctaaagaaggcgatgtatatatttttgatgagccaacgaatttcttagacattagagaaaggcttagggtagctcttaaaataaaagccctaaataaaactaaaatcgttatagatcatgatttgcttatattggactatatagtagagttaatacatatagcttatggtcaaaaagcggcttatggaaaatttagccaacccaaaggtaataatactgctataaatgaataccttaaaggctatttaaaaagcgaaaatataagaattagagatttcgaattatatttcttagaaggcactgaaaaagaaaggggcaaaaccatatatttagaatggaaaccatttacaatagatttgggcaatttcaaattagaagcggaaaaaggagaggtatacaaaaaagaaataataggtattgttggcccaaatggtataggaaaaaccacatttattagagcattaaaaggagattttgatgttaagcccatagagaaaaaaataaccattagctacaaacctcaatatatagagcctaaagaagttactgttagaaaattgttcgaacaaatgaatcccaattatagaaacgaattttatgattctctattaataaggcctttagaattatatgaattgttcgaccacgatttaaccacattaagcggaggggaattacaaaaagttataaccgctgccgctttactcaaagaagcagatttgtatttaattgacgagccaacagcatttttagatatagaagaaagggttagaatagctagagcaataagaaatataattaaagaaaaaggcaaggccgctttcgttatagaccacgatctaatgtttatggaatacataagcgattcgataatggtttttgaaggagagccatcgaaatatgggaaagcaaataaacctttacctataaaagaagggctaaacttgtttttgaaaaacatgggtataacaattagaaaagtaaatggtagaccaagaattaatgaacctggttctagattggatagagagcaaaaagcccaaggtttatactattattaa

SEQ ID NO: 585 - protein, 574 aa, Nanoarcheum equitans
MIQMRIAIIDRTKCKPNKCNYECYNFCPLNRAGKKCIEIIDGKPVIDESICIGCGLCVKKCPFKAIKIINVPEAKGEVVFQYGPNSFRLFSLPIVKMGKSIGILGPNGIGKTTAIKILSGQLKPNFGDYNKEYSWEEIIEKFKGTELQNYFELLSKGQIKVIHKIQEIQKLREVFKGKTVRELIKLDNPLLKEFGLDKILDRKIENLSGGELQKLLIYASLSKEGDVYIFDEPTNFLDIRERLRVALKIKALNKTKIVIDHDLLILDYIVELIHIAYGQKAAYGKFSQPKGNNTAINEYLKGYLKSENIRIRDFELYFLEGTEKERGKTIYLEWKPFTIDLGNFKLEAEKGEVYKKEIIGIVGPNGIGKTTFIRALKGDFDVKPIEKKITISYKPQYIEPKEVTVRKLFEQMNPNYRNEFYDSLLIRPLELYELFDHDLTTLSGGELQKVITAAALLKEADLYLIDEPTAFLDIEERVRIARAIRNIIKEKGKAAFVIDHDLMFMEYISDSIMVFEGEPSKYGKANKPLPIKEGLNLFLKNMGITIRKVNGRPRINEPGSRLDREQKAQGLYYY

SEQ ID NO: 586 - DNA, 2826 bp, Nanoarcheum equitans
atgaaaactctagcaaaagcccaagtagttttagcaagcggtatgttattggctggagcagtagcccaaaacgaccaaacacaaaacaacacagaaaccttaaagagctttgtaaacaaaatggttcaagatttgtctaaagtaagaattgttattagcgacgctccaactgtagaggaagcaatggctgctacagatgttgcattagttttatattacaaagctgtagaagtatctaaacaagaaaaagaagtaacttatgaagtaaaaagcaaaaaagtagtagttgaatatccaaaaacagtatccgaaaatgaggtacccttatacaaagctacagagaaaattgaattaggagaaggtttaactggaggtggtgtatattccatctctaacgaattagtattcaaagatggaaaaataaaagacaaagacaatgtagaatattattacacagttagattcaaaccttcttctaacgcaatagtagtgtttaaagacaaacaagacacagaggaagaagatcctactgtattaatagatggaggtagtaatgaattctatacaatagaagtaacatttactccaagcttaccaagtgatacagatactttagaggataaagaattaaatcaaaaagcaatggagatagcaggcaagaagttctatatctctgaagtaggagacaagaaaattgtattgagagaagcaagcaatgtagtaacattaaatgttggtgaatcttacgagtttgaaggtaaaaaagttgaattggtagatgtagtaaaacaaggggacgagtattatgctgtgattaaagtaggggatgaccaagaaacaataaaagttaatgacgaagaaaaagtaggtggagttgatgtaaaagtattgggcgcatgggtatctgaaacacaagaagggaaagcttatgcaaaagttatattaggagggaagaaaatagaattacaagaaggaaacaaagtaaaagttggtggcgaagacatagataatacagaagttataaaagcaggaccatctggatttaagataaaggtatatgtaaacaaagacgatacaacaaagaactacttagaaaatggaaaagaattagtagacccagtatttggcacatttaaattagtattcaaaccagtagacttggtagcaggaaaagaaaaagtaaaagtatacgcatctggagaagatgcatatataaaactaccattagtagaaggagaaaaaacattcaaaatagtagacggtattgatgatagtaataatttagtaattaatgaagattggtatgtttcaattggggaatcccccgacgctaatagtttcaacaagttattaacagtactagggggagtttctggcgacttaagagttaatatatattataaggatagtaacggtgtaaagaaaccatactttgtagtatcattgccaacaagcagagaaacatatgtataccaagttaactctgtaacagtggataacgataataacattgcaaaagtagagttaaaagatgttgtaactggaaacacatttactgtaaatgttgacttgaatactggctatacaacattaaccataggtggagtcgactttgaactacatgttagcactgatagtagcaaaactgttgtatacttagacaaagtggttgtaataccatctctattattctacacaaaggatggccataaagtatatatatggaagaaagatagcaatgtatatacaatagtaagcgaattccaaggaaacgacgtgtacacttttgctggagaggtagagttatatccagatacaaacgataagaaagtggctgtaagcttccctaggcaagaccaaaacttaaaactagagggactagaaccattcatattagttaaagctgaatggggtaatgatgttgcatacaacacatctaatggtgataatacagttactgcaaacttaactatcgttgatgtattacattggtatgaaaaatcactcaataatgtacaactaacagtaactgcccaatctggaaatgatacagcacaaggttatgtatattataacacaagcgatgggctaagcttcaaaatcacagtaactgcaacacttccagataaccccgatgacaacgcaagcgaaaatgttgttaatgatggtgcaacccttaacgttaaggtaacagaggaagatagcgtattaaatgataaaatggtaagaaacttcgtttcactagaggacaacgaattcaaaggattagatcaatggggcacatatatccatggagacgaagagaaggacggcgatggttatgtagaattctatgtaccaaacgaaaaagtatggtacgacataagagtagccaaaactggggaaaccaaagaagaatatcaaacaatggaattgacaccaggtgaaaagatagacaatacacaatacaaagtgaaagatgtacaagcagatgtagaaataaacccaaccaaatactacgaatacaaagtaaaaccagtatatggattagtagtagcagatgtagaagcagttagcggttgccaagtagccggtgcagaatacgcaatagcaataggtacaccaacagacaacatgttagtagcaaactgtgttaaagaagaattaatgccaggacaagcattagttaaactattagcagacaagaaagtagtagtaatgacaggtaagaccccagcattagcagccaaagcagcagaagagtttgctaaaaaagtaatgaacgatgaagtaccagaaaaagcagagatggtagtaacacaagaaggaacagtagcaagccaataa

SEQ ID NO: 587 - protein, 941 aa, Nanoarcheum equitans
  signal (1)..(24)
MKTLAKAQVVLASGMLLAGAVAQNDQTQNNTETLKSFVNKMVQDLSKVRIVISDAPTVEEAMAATDVALVLYYKAVEVSKQEKEVTYEVKSKKVVVEYPKTVSENEVPLYKATEKIELGEGLTGGGVYSISNELVFKDGKIKDKDNVEYYYTVRFKPSSNAIVVFKDKQDTEEEDPTVLIDGGSNEFYTIEVTFTPSLPSDTDTLEDKELNQKAMEIAGKKFYISEVGDKKIVLREASNVVTLNVGESYEFEGKKVELVDVVKQGDEYYAVIKVGDDQETIKVNDEEKVGGVDVKVLGAWVSETQEGKAYAKVILGGKKIELQEGNKVKVGGEDIDNTEVIKAGPSGFKIKVYVNKDDTTKNYLENGKELVDPVFGTFKLVFKPVDLVAGKEKVKVYASGEDAYIKLPLVEGEKTFKIVDGIDDSNNLVINEDWYVSIGESPDANSFNKLLTVLGGVSGDLRVNIYYKDSNGVKKPYFVVSLPTSRETYVYQVNSVTVDNDNNIAKVELKDVVTGNTFTVNVDLNTGYTTLTIGGVDFELHVSTDSSKTVVYLDKVVVIPSLLFYTKDGHKVYIWKKDSNVYTIVSEFQGNDVYTFAGEVELYPDTNDKKVAVSFPRQDQNLKLEGLEPFILVKAEWGNDVAYNTSNGDNTVTANLTIVDVLHWYEKSLNNVQLTVTAQSGNDTAQGYVYYNTSDGLSFKITVTATLPDNPDDNASENVVNDGATLNVKVTEEDSVLNDKMVRNFVSLEDNEFKGLDQWGTYIHGDEEKDGDGYVEFYVPNEKVWYDIRVAKTGETKEEYQTMELTPGEKIDNTQYKVKDVQADVEINPTKYYEYKVKPVYGLVVADVEAVSGCQVAGAEYAIAIGTPTDNMLVANCVKEELMPGQALVKLLADKKVVVMTGKTPALAAKAAEEFAKKVMNDEVPEKAEMVVTQEGTVASQ

SEQ ID NO: 588 - DNA, 237 bp, Nanoarcheum equitans
atgggaagaagatacttttggttatattcagagaaccaagagctaatagagctatttgatagagtagcaatggaatacaatttaaccccttatcaattaaggcaaatattaagagagattgtaaaaaagaaattaaaagaactattagataagaaagacctagtaagagagaaaataaaagaagaagcagagaaaggttatccagatatagtaaaaattatcttatctattctctaa

SEQ ID NO: 589 - protein, 78 aa, Nanoarcheum equitans
MGRRYFWLYSENQELIELFDRVAMEYNLTPYQLRQILREIVKKKLKELLDKKDLVREKIKEEAEKGYPDIVKIILSIL

SEQ ID NO: 590 - DNA, 1689 bp, Nanoarcheum equitans
atgtacaaagaaataatagcctatcttaagcttaaatatggaaaagtaaaaccccaatctgttattggtaaaataatagctaaaaaccccgagttaaaagctaaaataaaagagctaatccctataatagagcaagagataaaagaggtagaacaaatggatatagaacaaataaaagaattagctaaagcttatgaacaaaccatagagaaaaaagaaaaagacatagagataccggtaaaagacaaagtaataacaagatttgctccaaacccctcggggttattacatataggccatgcaagagctatagttctaaaccattatattgcaaaaaaatataatggccaattcatattaagaatagaagataccgatccagatgtaaaaaaacctatgattgaggcttacgagttaataccgaaagatgtggaatggttaatacaagaaaagcccgacaaaatagttgtacaaagtgatagattagatatttactataaatatatagaagagcttataaaacaaggcaaagcatatgtttgtttatgtaaagctgaggaatttagagaatatagaaacaaaggtttaccttgcccccataggaatcaatctatagaagaaaacctagagttatggagcaaaatgttaaaaggcgaattcaaaaaaggagaagcggtagtaagattaaaaacagatttaactcacaaagaccccggggtaagggatttccccatagcgaggatagtagaaaaccctcatcctagaatagggtataaacctgtatttccattatataattttgctgtcgtaatagatgaccatttacttggcataacccatgttattagaatgaaagaacatacaaacaatgctataaagcaatcttttatatataaagcatttggttgggaagaacccatctatttggagtatggtgctctattaacggatatgcccacacataaaagcgaaataagaaaattaatagaacaaaaacaaatcgaaggttgggatgatattagattgccaacattaatagcattaagaaggaggggaattttaccagaggcgatatatgaatatatagtaaaagatgtaggattaaacaaagccgatataaaagtagattggaacaaaatatattattatcataaaattaggatagacaaacaaactcccagatattttatgattagagatcctatcgcaatagtaatagaaaactatgacgatattatagacaaattcgaaataaaaaatggcatcccatataaaaagatttctaaacatccagatgttgatttggggtatagggaattaccaataaaagaggtattatatatagacaaaagagatgctgaaaggctcaaacaaaagccattaagattattcgagctattcaatataaaatttgtgggcgaaatagaaattgagtatggcgatgaatattctaaaacaaaagagaaagcttatgctgttagagttatatctttcgatgtgcaagaagcaataaaaaacaaataccccatagtgcaatggttaccggaatatgaagaaactacattatttgaattggatggatataaaaaagcttatgtagagccaaacattaaagagaattatgtgcattttattagagaaggttattataaaagggaaaatgataaatggatatttagtgtgaaatag

SEQ ID NO: 591 - protein, 562 aa, Nanoarcheum equitans
MYKEIIAYLKLKYGKVKPQSVIGKIIAKNPELKAKIKELIPIIEQEIKEVEQMDIEQIKELAKAYEQTIEKKEKDIEIPVKDKVITRFAPNPSGLLHIGHARAIVLNHYIAKKYNGQFILRIEDTDPDVKKPMIEAYELIPKDVEWLIQEKPDKIVVQSDRLDIYYKYIEELIKQGKAYVCLCKAEEFREYRNKGLPCPHRNQSIEENLELWSKMLKGEFKKGEAVVRLKTDLTHKDPGVRDFPIARIVENPHPRIGYKPVFPLYNFAVVIDDHLLGITHVIRMKEHTNNAIKQSFIYKAFGWEEPIYLEYGALLTDMPTHKSEIRKLIEQKQIEGWDDIRLPTLIALRRRGILPEAIYEYIVKDVGLNKADIKVDWNKIYYYHKIRIDKQTPRYFMIRDPIAIVIENYDDIIDKFEIKNGIPYKKISKHPDVDLGYRELPIKEVLYIDKRDAERLKQKPLRLFELFNIKFVGEIEIEYGDEYSKTKEKAYAVRVISFDVQEAIKNKYPIVQWLPEYEETTLFELDGYKKAYVEPNIKENYVHFIREGYYKRENDKWIFSVK

SEQ ID NO: 592 - DNA, 258 bp, Nanoarcheum equitans
atgcgtggtatagtgattagctatagaaggggcaagcacacccagaataattaccaagttatagtacaaccagagaatgtattcgataaaaaagaagcctctaaattggttggtaaaaaagtaatatggaaaagccccacaggaaaaacctttgttggggtaataacagccccacatggtaataaaggcaaagtaagagtaagatttagaaagggggtcccaggccagatgttaggtaaactagtaacaatacaatga

SEQ ID NO: 593 - protein, 85 aa, Nanoarcheum equitans
MRGIVISYRRGKHTQNNYQVIVQPENVFDKKEASKLVGKKVIWKSPTGKTFVGVITAPHGNKGKVRVRFRKGVPGQMLGKLVTIQ

SEQ ID NO: 594 - DNA, 198 bp, Nanoarcheum equitans
atgatccgcaatagaatattagaaatattaaacgaaaggggaaaaatagagttcaaagagctggtaaaagagttaaaaacccacccatatgttgttagaaaaatagttgaagaactaagaagggaaggaaaaataaatctaacaaaagaggtttaccatcacaaacccaaaaagtttaaactatttgtatcactttag

SEQ ID NO: 595 - protein, 65 aa, Nanoarcheum equitans
MIRNRILEILNERGKIEFKELVKELKTHPYVVRKIVEELRREGKINLTKEVYHHKPKKFKLFVSL

SEQ ID NO: 596 - DNA, 444 bp, Nanoarcheum equitans
atggattggttaaaagttttaaggaatatagcggattattggtttggcccaaatactggaaaaatgctaatcccggacaatgctaaaataatatttggaaaaactaatagacccaggcaggtttggtataataatagaaggcttttctctattagggcagaggatttctattatattttaggatatggagctttgttaataaaagacaaactaaagaaagtctatatcgatacaagtttagagaaaaaaagctctattattgggaaagacataaaagattatgacaaatttaaaccaggagagaatgtgcttatttattataataataaacctatcgctgttggtattgcgagactttcctataaagagatttatggcaataacgaaattataaagataaaagaaaaattctcaaatgatagcgatagtaactggggactctag

SEQ ID NO: 597 - protein, 147 aa, Nanoarcheum equitans
MDWLKVLRNIADYWFGPNTGKMLIPDNAKIIFGKTNRPRQVWYNNRRLFSIRAEDFYYILGYGALLIKDKLKKVYIDTSLEKKSSIIGKDIKDYDKFKPGENVLIYYNNKPIAVGIARLSYKEIYGNNEIIKIKEKFSNDSDSNWGL

SEQ ID NO: 598 - DNA, 669 bp, Nanoarcheum equitans
atgatagcgatagtaactggggactctaggggaataggaaaagcaatagcagagagattgtatggattaggatataaaacaattggcattgctagatctaatgtaaaaaccgattggatacatgttacaggggatataacaaaagaggaaacatgggacaaagtattagaattaatagaccaacccataagggtttttgttcacaatgctggaatacacgaaaagaagacattcgaatataatagtttggatgaaataaaaaaagtatatgaagttaatgtttttagcgcgatattagggttgaaaaaattatataagcatatcccaagggatgaaaactctttgatagtatttatttcatctataaccgcttttgccggttctaatagtgggggtataggctatgtttcttctaaagcagctttggttggattggctaaacaattatctaaagaattaaaacctattagggttaatgctattgcccctggttacaccgaaacggatatgataaaacattgggatgaaaaaagaaaagaagagacaataaaaagaatccccttgggaaggttagggaaacctgaagatatagcagatgtagtagagatgttaataaaagccaaatacattaatgggcaaaccatacatgtaaatgggggcttatactag

SEQ ID NO: 599 - protein, 222 aa, Nanoarcheum equitans
MIAIVTGDSRGIGKAIAERLYGLGYKTIGIARSNVKTDWIHVTGDITKEETWDKVLELIDQPIRVFVHNAGIHEKKTFEYNSLDEIKKVYEVNVFSAILGLKKLYKHIPRDENSLIVFISSITAFAGSNSGGIGYVSSKAALVGLAKQLSKELKPIRVNAIAPGYTETDMIKHWDEKRKEETIKRIPLGRLGKPEDIADVVEMLIKAKYINGQTIHVNGGLY

SEQ ID NO: 600 - DNA, 528 bp, Nanoarcheum equitans
atggaaacccttcttatgataaagcctgacggggtaaaaagaaaacttataggtaaaataatagaaagaatagaaaatgcaggtttagaaataaccgatattaagatgttacaattcactagagaaatggcagaacaattttatgttttccccgaaagttggtatgaaaaagtgggtaacaagctaataaaaatatttgaagaaaaaggcttggacatagaacaagtatataaaactagagacccaatagagataggcaaaaaagttagagaggcattaatagaatatatattatcaggaaaggtcgtagctattagaattaaaggagacaaagctatagagaaggttagaactttaattggagatacagacccattaaaagctttgcctggcaccattagaggggatttctctagtgattctattgaggttgcaaacttagaagggagagctgtttataatgtggtccatgcctcagatagcgaagaaaatgctaagagggaattaaaaattgtcttcggctactaa

SEQ ID NO: 601 - protein, 175 aa, Nanoarcheum equitans
METLLMIKPDGVKRKLIGKIIERIENAGLEITDIKMLQFTREMAEQFYVFPESWYEKVGNKLIKIFEEKGLDIEQVYKTRDPIEIGKKVREALIEYILSGKVVAIRIKGDKAIEKVRTLIGDTDPLKALPGTIRGDFSSDSIEVANLEGRAVYNVVHASDSEENAKRELKIVFGY

SEQ ID NO: 602 - DNA, 414 bp, Nanoarcheum equitans
atggacttagaaacgaataaaagaaaactaaatttcctaattagaaaccccataaaagcaatgtccaaactaggagaagttcgtgcttttttatctaaggacaaacttgttatatacaataattttttcaaaactggcaaaggattcctttactatttaactccaagtgaagaagagttgtatggagtaattaagaaaaaaatgaaatatcttgaggtaccggttgtaccaccctttgcccgagagattggatattatggggaatgccgagacatgggttttggttattattgtaaaccttactcctttttattgctatatggaaaatacgaaaaccctcttgttggtcgtttgatggaattgtatatcaaaaccaatatagagtatttaaaagactattttaatctattataa

SEQ ID NO: 603 - protein, 137 aa, Nanoarcheum equitans
MDLETNKRKLNFLIRNPIKAMSKLGEVRAFLSKDKLVIYNNFFKTGKGFLYYLTPSEEELYGVIKKKMKYLEVPVVPPFAREIGYYGECRDMGFGYYCKPYSFLLLYGKYENPLVGRLMELYIKTNIEYLKDYFNLL

SEQ ID NO: 604 - DNA, 1455 bp, Nanoarcheum equitans
atgattgatgtagaatttttgcgtaaatacccagagaaatacaaagaaatgttaaagaaaagattcatggatactagtatagttgacgaatttttggcttatgataatttgtggcgatctttgaaaaaagaattggataatctaagatgtttgcacaatgcaatctctaaggccatcgctacaggcaaattagagcacaattgcaatacaaaaatagagcttaaagatgataaagaatatctgataactttagccaaatccttaaaaaaagagatagaaattttggaaaaacaattgaaggaaatagaaagtaagagaaacgatattctatggaggatgcccaattatattagagaagatgtccccattggagaagacgaaaggtataacaaaccattaaaatattggggagtagcgaaagttttggatgtagaaaaattcaaacaagaaactcaaagaaaaccgattaatattttggaattagatcctaggtatataaaggatagcctaacatacaaagaattaatagattttcttagaagtactaatcctgaatattttgttaatcccgatgaggcaatagactttgatttgttaaacaaagaagggttagtattatatataaaaatagacaaagctaaacatcattatgatttaactaaagagctaaatattgccgaccaagaattaggctcaaagatagctggctctagattttatgtcgaatttgaaaaaggtttgtttatggaattaaaactaattaagtttgttttagaaaccttaaaaagtaggactgaaggaaaatataattacaaaataatgaagctaccttatttagttaggggttgggtagaaaaagctgcagcatattttacagcttttgaagatacattatacaaaatagagggcgaagatctatatctaaaccctaccgctgaacatccaattgctggtttatacaaagattattattttaatgataacgagttgcctttaatagtatatggctttactactgcttttagaaaagaagcgggaagtcatggaaaagatacaaaaggcatatttagagtacaccaatttgaaaaaatagaacaatacgctttcacaactaaagaacaactattagaaatatacaatttcttagtttccaatgctgaaacaatagttaaaaagttaggcctcccttataggatagtatttaattcctctggagatatggataaaaaagttacaatgcaatgggatttagaagtctattacccagcccaagagaaatatagggaattacattcctttggaactgtagaggaatggcaagccagaaggttaaacataaaatactcgaaaggctatgttaatacaatatatgctacagctttacctatacaaagggcaatgaccgctttgttggaaaacaatttgtttgaactaaattataatagattaaaatag

SEQ ID NO: 605 - protein, 484 aa, Nanoarcheum equitans
MIDVEFLRKYPEKYKEMLKKRFMDTSIVDEFLAYDNLWRSLKKELDNLRCLHNAISKAIATGKLEHNCNTKIELKDDKEYLITLAKSLKKEIEILEKQLKEIESKRNDILWRMPNYIREDVPIGEDERYNKPLKYWGVAKVLDVEKFKQETQRKPINILELDPRYIKDSLTYKELIDFLRSTNPEYFVNPDEAIDFDLLNKEGLVLYIKIDKAKHHYDLTKELNIADQELGSKIAGSRFYVEFEKGLFMELKLIKFVLETLKSRTEGKYNYKIMKLPYLVRGWVEKAAAYFTAFEDTLYKIEGEDLYLNPTAEHPIAGLYKDYYFNDNELPLIVYGFTTAFRKEAGSHGKDTKGIFRVHQFEKIEQYAFTTKEQLLEIYNFLVSNAETIVKKLGLPYRIVFNSSGDMDKKVTMQWDLEVYYPAQEKYRELHSFGTVEEWQARRLNIKYSKGYVNTIYATALPIQRAMTALLENNLFELNYNRLK

SEQ ID NO: 606 - DNA, 429 bp, Nanoarcheum equitans
atggacataatgaacaaacaagccattagggatttatttaaaaggttggaaaaggagtatggattaacagagcaagagaggtttatgaactattattatttaagagggaaaaagaaaatatttataattaataaaccaatcgaaatagagaaaaaagaaagagagggcatacatataattagtgaagagccatttggcttaaggctaacaattgaaggctctcaaatgtttgggcctttccttacaaaaaaagtaatagaattaaatagggaacaatttttgcaatatttgagaggtaaagacttagaaatcgaaactccctataaaaaggaattcgtcgttttgaaatataataacatatttttaggaagtgggttagcttatcctaataagattataaattatttacccaaagctagaaggatatga

SEQ ID NO: 607 - protein, 142 aa, Nanoarcheum equitans
MDIMNKQAIRDLFKRLEKEYGLTEQERFMNYYYLRGKKKIFIINKPIEIEKKEREGIHIISEEPFGLRLTIEGSQMFGPFLTKKVIELNREQFLQYLRGKDLEIETPYKKEFVVLKYNNIFLGSGLAYPNKIINYLPKARRI

SEQ ID NO: 608 - DNA, 486 bp, Nanoarcheum equitans
atgagggctttctatagtatagcgctattctctatattaactttgatatcccttttgatagcccatgttctaataacaaaaaccaacccaaaatctgttgaaaaggccgaaaagtatatacctttgcaaaaaccagatttagaaaagaaaaaaggttatatagatgtttgttctctaagaaaagaaaatatggttgctgcaatattaagatatggcagtgctgctccaactttgtgttataattgctataaaaatagggacgaatgtttaaggtggtttttagaatttaaatccaaatttaatggaacaatacttaatactgaagacaaatgcaaatcagagaaaaactattattataggttagcttgttatctaattaacgatgtgagccctataaagatttattgcaaatacattaaagaagatgtaaaatttgcaaattttgttagggattattttgacttgtattcgttagattgcccttaa

SEQ ID NO: 609 - protein, 161 aa, Nanoarcheum equitans
  signal (1)..(26)
MRAFYSIALFSILTLISLLIAHVLITKTNPKSVEKAEKYIPLQKPDLEKKKGYIDVCSLRKENMVAAILRYGSAAPTLCYNCYKNRDECLRWFLEFKSKFNGTILNTEDKCKSEKNYYYRLACYLINDVSPIKIYCKYIKEDVKFANFVRDYFDLYSLDCP

SEQ ID NO: 610 - DNA, 468 bp, Nanoarcheum equitans
atggccttatatgccatatttagagttaggggtagggtagatgttagaaaagacatagaagatactctaaaactattgagagtacataggaagaactatttatcaattatgccaaaaaccgaatctatagaagggatgatacaaaaagccaaagactatattacatggggcgaaattgatgaaaaaaccctagcagaattgttaaagaaaaggggtagaattagtaggaggaaaaaacttactttagaatatataaaagaaaaaggttttaattcatttgaagaattggccaaagcattaatcgagggaaaagttactttaaaagaattgggaataaaaccattctttaggctaaggcccccatctaaggggtatggaaaaaaaggaataaaaaaacattttaacgaaggaggtgctttgggttatagaggagaaaaaataaacgatctaattttaagggcaatctaa

SEQ ID NO: 611 - protein, 155 aa, Nanoarcheum equitans
MALYAIFRVRGRVDVRKDIEDTLKLLRVHRKNYLSIMPKTESIEGMIQKAKDYITWGEIDEKTLAELLKKRGRISRRKKLTLEYIKEKGFNSFEELAKALIEGKVTLKELGIKPFFRLRPPSKGYGKKGIKKHFNEGGALGYRGEKINDLILRAI

SEQ ID NO: 612 - DNA, 249 bp, Nanoarcheum equitans
atgagaacaccagcgagagagtattttggtaagctcgttattagccaaacaggaaaaaaatttggaatagtgagcgatttggtttttgacaagaaaactggtgaaatagtatttttagtaataaaagaaccaaccccccatttggaaaaatataatctagaaaaagacattgatgggtcttatttaataccatttagcgctgtaagatcaataggagatttcgttgttatagatgagagcgaattataa

SEQ ID NO: 613 - protein, 82 aa, Nanoarcheum equitans
MRTPAREYFGKLVISQTGKKFGIVSDLVFDKKTGEIVFLVIKEPTPHLEKYNLEKDIDGSYLIPFSAVRSIGDFVVIDESEL

SEQ ID NO: 614 - DNA, 402 bp, Nanoarcheum equitans
ttggtagaaaataaaaatggtatgcgcataatattagacacaaacgctattatggctatatttaattacggtatagacattatagatttaattaacaaaaaatacaaagccgaatactatgtaacaaaatctatcttaaatgagctaaaagctattgctaatgatcctaaaaggaagggccgatatagaaggaacgcaaaattggctttgcaatatctaaaaataataaatgcccaaatattaaacttagatgggaaaactgacgaaattttgaaagatctatctaaagattttgttatattaactttagacaaagacttaaaaagagaaataatcaaaaaaggcggtttctatatggaattgagaggaggcaaattatataccaattatccagatttataa

SEQ ID NO: 615 - protein, 133 aa, Nanoarcheum equitans
MVENKNGMRIILDTNAIMAIFNYGIDIIDLINKKYKAEYYVTKSILNELKAIANDPKRKGRYRRNAKLALQYLKIINAQILNLDGKTDEILKDLSKDFVILTLDKDLKREIIKKGGFYMELRGGKLYTNYPDL

SEQ ID NO: 616 - DNA, 597 bp, Nanoarcheum equitans
atgctattaaatgatagagaaattaaagagctaatagacaaaaaagagataattattgagcctttttcctatgaacaaatccaaccagcatcgatagatctaaggctaggcaatagatttagaattttcagaaaaggcgaaatagaggtaattgatcccaaggattttaaggatgaactaataaagatagaacaagatgaaaataaaataattgaaaaatacaaatataccgatgtaattattacagagaaccctttcattatttatccaggggattttgttttagcctctatatatgaatatataaaattgccaagatatatagcagcacaattgcatggcaaatcctctatagctaggttaggtttaattatacatacatctgcaggttggatagaccctggttatgagggccatctaacattagaaatatttaatactaacaatgtgccaattaagctttaccctaaaatgaaaatagcacaattgcagctatttagaataaatcctgtagagagagactataaagaaaaaggaggtaaatactataaagaaaaaggtgctacctctagtgagatatggaaagactttatatag

SEQ ID NO: 617 - protein, 198 aa, Nanoarcheum equitans
MLLNDREIKELIDKKEIIIEPFSYEQIQPASIDLRLGNRFRIFRKGEIEVIDPKDFKDELIKIEQDENKIIEKYKYTDVIITENPFIIYPGDFVLASIYEYIKLPRYIAAQLHGKSSIARLGLIIHTSAGWIDPGYEGHLTLEIFNTNNVPIKLYPKMKIAQLQLFRINPVERDYKEKGGKYYKEKGATSSEIWKDFI

SEQ ID NO: 618 - DNA, 771 bp, Nanoarcheum equitans
atgaatgatataaaagatataataaaaagaaattcttggattttatttttagttgggataatcttgttttcccatatatattccattttaactaaagggaatgttgcagttatatacatagacaagccaataacgagcgatttcgctgaaaaggttatagattttttaaaagaagctaaggactacaaagctattgttttatatatagactctcctgggggcgctccagaaccaacatatagaattatcaaatatttagatagaataaacaaaactaaaatttcttatattgcacaatatggcacttctgcttcttattggattgctactcatacaaataaaatatttgctaatgaattaagcttcgttgggagcgttggagtattaataggcaaaatagacctaagcggtttgttatctaaattaggagtaaaatattattctttctctaaagggaaatacaaagagtttagcaatcctttgttgcctttagataattatactaagcaatattataatgaattggcagacaaattatataatttctttttaaccgatgtattagagcatagagatataaaaaaggaatgcttatctaaagtaaaggaaagcaccatatttttaggaatagaagctaaaaaatgtggtttaatcgattatattggaaccatggatgatgtaaaagcatatttagaaaaaacattaaaaataaaggtaaaatttgagccttttagggaaaaagctttattctatttaagtttccctatataa

SEQ ID NO: 619 - protein, 256 aa, Nanoarcheum equitans
MNDIKDIIKRNSWILFLVGIILFSHIYSILTKGNVAVIYIDKPITSDFAEKVIDFLKEAKDYKAIVLYIDSPGGAPEPTYRIIKYLDRINKTKISYIAQYGTSASYWIATHTNKIFANELSFVGSVGVLIGKIDLSGLLSKLGVKYYSFSKGKYKEFSNPLLPLDNYTKQYYNELADKLYNFFLTDVLEHRDIKKECLSKVKESTIFLGIEAKKCGLIDYIGTMDDVKAYLEKTLKIKVKFEPFREKALFYLSFPI

SEQ ID NO: 620 - DNA, 417 bp, Nanoarcheum equitans
atggtagttaggagaaggaaaaaataccataaatataaaggggaaagacatgctagaaggggttacaatgatagaaatagaaatgccggtattagaggaggaaggggaaaagctggttatggtaaaatgaaagaccataagaaatccatttatatacccgcaaaaggatttaataaccctacaactaaggaaattaaagctataaatataagaactattgttgaaaatctagataacctatacaaaaagggtttagtaactaaagaaggggacaaatatataatagatttagaaaaattgggctataacaaattaataggaaggctaactaagccatatccaatagttgtaaaagccaaatatattgcagaaacaacaaaggagaacttacaatcccttggaattgaaatagaatga

SEQ ID NO: 621 - protein, 138 aa, Nanoarcheum equitans
MVVRRRKKYHKYKGERHARRGYNDRNRNAGIRGGRGKAGYGKMKDHKKSIYIPAKGFNNPTTKEIKAINIRTIVENLDNLYKKGLVTKEGDKYIIDLEKLGYNKLIGRLTKPYPIVVKAKYIAETTKENLQSLGIEIE

SEQ ID NO: 622 - DNA, 2106 bp, Nanoarcheum equitans
atgcttaggctagaggaaatagatttggatactattaaaaaggaattggacgaagaaaggaaaaaagttgaagaaattatgaaaggaaatattccaacagaaataaaagatcttattaaaatggtattgtttattgtggaatccccaaacaaagctagaactatagctaatttctttggcaaaccttctgtaagaaggataggaaatataaaagcttacgaaaccacaacaggtaaatatatattaacgatagttgccacaaagggacatctatttgaattaacattaaaggaagaaggtgtttatggcgtattaaaagaaaaagagtatgtaccgattttttccccaataaaaaaatgtttagattgtgggcatcaatttgttgacgaagataaatgtccaagatgtgggtctgaaaatatagatgatgccagcgataggattaaggttttaagagatttggcccaagaagcagatatagttttgatcggaaccgaccccgatgcggaaggggaaaaaatagcttatgatgtttatagcattataagaccatacaataaaaacatctatagggcagaattccacgaggtaactaggcaagctattataaaagcattagaagagataagggatataaatacaaatagagttaaagcccaattggttagaaggatagaagatagatggatagggtttgctctatctcaaagattatggagtaggtttaagaaaaaaactttgtccgctggaagagtacaaaccccggtattgggctttataataaaaaggtatgaagaatataaaaagaatagagcccattattatgctgtaaaaaccagtgattttgaagtaactttcattagcgacgatcccttagaaaaatatgataaaacaataaaaatagagaaaatagaagaaaaagaaagcgaaaagaaacctttgcctccttatactacagatagtttattaagagatgccgtaatagagctaagattaagcgttgataaaataatggctttagctcaaaacctatttgaatggggtttaattacctaccatagaacagattcaacacatatatctaatttgggaatccaaatagcgcaaacatatatagaaaatactttcggtaaggaatatttttatcctagacattggggagaagaaggcacacacgaagctattaggcctactaaaccaatagataccgaaaccttaataaaaatgctaagagaaggcgatattcaaatacaaggtataactaaagagcatattaggttgtacgatctaatttttagaaggtttatagcgagccaaatgaagccatttattgctatagaaaccaaatttaatgctgtatggtctaacttaaatacaacaatagaaggcattacagatataaaagagaatgggtggaatttaattaaaccgattaaattgttagcaataaaagaaggggaatacgaagttattgatgttaaacattggattggctctaaagttccattgtatactcaagcggatgttattgaattaatgaaagagcaaaacattggaaggccttcaacatatgcaacaatagttaaaaagctctttgagagatattatgtaatagaaaaaaaccaaaggctaataccaacagagaggggcataaaagtataccaatatttaacagagaggtttggccatttagttgatgtaaaattaactgcggatttgttagaaaaaatggatagaatagaaaatggcgaactggattacatggatgtattaagatcttttaaaaaagagctaatagaaatatggaaaacgaaagaaaccaaatatattgcagatggaatatataaatggaaagaatattctgtgcctgcaatagtttatgagaggtatgaaaaaatactaaaaaggaaaaaggtttatcctgaatatctaacaccatggtctagggctatttataatgctttaccattagataatgaaatagaaaaacaaacattggctttagcaatagagaaagactttgaaatactaactaaaaaacctatacttagagaatacaaaaagaagtatgaacatttaaagaatttggtcgaccaactattataa

SEQ ID NO: 623 - protein, 701 aa, Nanoarcheum equitans
MLRLEEIDLDTIKKELDEERKKVEEIMKGNIPTEIKDLIKMVLFIVESPNKARTIANFFGKPSVRRIGNIKAYETTTGKYILTIVATKGHLFELTLKEEGVYGVLKEKEYVPIFSPIKKCLDCGHQFVDEDKCPRCGSENIDDASDRIKVLRDLAQEADIVLIGTDPDAEGEKIAYDVYSIIRPYNKNIYRAEFHEVTRQAIIKALEEIRDINTNRVKAQLVRRIEDRWIGFALSQRLWSRFKKKTLSAGRVQTPVLGFIIKRYEEYKKNRAHYYAVKTSDFEVTFISDDPLEKYDKTIKIEKIEEKESEKKPLPPYTTDSLLRDAVIELRLSVDKIMALAQNLFEWGLITYHRTDSTHISNLGIQIAQTYIENTFGKEYFYPRHWGEEGTHEAIRPTKPIDTETLIKMLREGDIQIQGITKEHIRLYDLIFRRFIASQMKPFIAIETKFNAVWSNLNTTIEGITDIKENGWNLIKPIKLLAIKEGEYEVIDVKHWIGSKVPLYTQADVIELMKEQNIGRPSTYATIVKKLFERYYVIEKNQRLIPTERGIKVYQYLTERFGHLVDVKLTADLLEKMDRIENGELDYMDVLRSFKKELIEIWKTKETKYIADGIYKWKEYSVPAIVYERYEKILKRKKVYPEYLTPWSRAIYNALPLDNEIEKQTLALAIEKDFEILTKKPILREYKKKYEHLKNLVDQLL

SEQ ID NO: 624 - DNA, 378 bp, Nanoarcheum equitans
atggctgagaaaccaccatatgtaaagtttgaagttccagaagagttagcaaataaggtctatgaactggttagaaaagccagagagaccggaaaaataaggaaaggaaccaacgagacaactaaagctgtagagaggggacaagctaaactagttataatagcagagaatgttaaccctccagaaatagtaatgcatttgccagcattgtgcgaagagaaaggtgtaccatatgtttatgtcccatccaaggaagaattaggtaaagcagcgggaataaatgttagtgctgcttccgcagctataatagatgcaggagaagcaaaagacttgttagaagaaattattagaagtgtacaagaactaaaagctaaatga

SEQ ID NO: 625 - protein, 125 aa, Nanoarcheum equitans
MAEKPPYVKFEVPEELANKVYELVRKARETGKIRKGTNETTKAVERGQAKLVIIAENVNPPEIVMHLPALCEEKGVPYVYVPSKEELGKAAGINVSAASAAIIDAGEAKDLLEEIIRSVQELKAK

SEQ ID NO: 626 - DNA, 441 bp, Nanoarcheum equitans
atgaaatgccctgtttgtggcaataaattagaaactattgaaactgtaaaagagattccttattttggaaaagttctaattagtacattaaaatgcaacaaatgtgggtggaaagatactaaaatttacatattggaaagcaagcctccggtagagttcaaatatacaataaataaagataatttagggaaactatttgttctaagcgagggcacaacaattaatataccagagttaggcattacatacaaatctgttggagaaaataaaattacgacattagaaggcttaataatggacataatcgataggctaaaaatattaaaagatgaaaaagttaaagaattggaaaaaattttagaacaagtcaaagaaggtaatagatccctagatatagaagttagggatgaattagggctatctaaggtattggattggtaa

SEQ ID NO: 627 - protein, 146 aa, Nanoarcheum equitans
MKCPVCGNKLETIETVKEIPYFGKVLISTLKCNKCGWKDTKIYILESKPPVEFKYTINKDNLGKLFVLSEGTTINIPELGITYKSVGENKITTLEGLIMDIIDRLKILKDEKVKELEKILEQVKEGNRSLDIEVRDELGLSKVLDW

SEQ ID NO: 628 - DNA, 219 bp, Nanoarcheum equitans
atgggtagagtaaaaataaaagtagtaaaaaggactgctttagaactatttaaaagatatcccgatatatggaccaaagattttgaaaaaaacaaaaaactagtccaagccctattaaagaaagtatcaaaaaaattcagaaaccaaatagcgggttatttagtaaggctagttaaattcaaagagcaaaacaaattaccaatccaataccttagatag

SEQ ID NO: 629 - protein, 72 aa, Nanoarcheum equitans
MGRVKIKVVKRTALELFKRYPDIWTKDFEKNKKLVQALLKKVSKKFRNQIAGYLVRLVKFKEQNKLPIQYLR

SEQ ID NO: 630 - DNA, 228 bp, Nanoarcheum equitans
atgacaaacgaaggtatcgtaaacgccccagtaacaagagatgacttagaaaaagcagtaccaggtaaaggtaaattaattagagagataaaactaatacttagagtttatgacaataattcattagaagttaaagttgaaggagtaacaagtacattcgaaataataggtgctgcagatataataaaaagaatagtagagagcaacttgtctccacaaaggcaatag

SEQ ID NO: 631 - protein, 75 aa, Nanoarcheum equitans
MTNEGIVNAPVTRDDLEKAVPGKGKLIREIKLILRVYDNNSLEVKVEGVTSTFEIIGAADIIKRIVESNLSPQRQ

SEQ ID NO: 632 - DNA, 519 bp, Nanoarcheum equitans
ttggattggcttaaattatataaagaattctataaatttgaggacaacccttttaaagaggggcaaaccatagaaggacaagcaaaaataattaaagagaaaaccaaacccccagcaaggtataatgaagcaaccctattaaaaaagatggaatccttgaatttgggcacaaaaagcactagggctttaattattgatattttattcaaaagaaactatgttaagggcaaatctatctatattacccccttgggggaaaaggttatagaagtttttgaaaaatacttacctcaaattattgatgttgaattaacaagaaaaatggaagaatatttagaaaaaatagagaaaggccatttagaatatagagaaaaagctattgaagaagcaaaacaaataataaaagaagttactaaagaaataaaagaaaaagaaaaagagattgggaaagagctttatgatgtttatcttaaagctcgtaattcacaggactctcgctcccgcaagcgtggcacttaa

SEQ ID NO: 633 - protein, 172 aa, Nanoarcheum equitans
MDWLKLYKEFYKFEDNPFKEGQTIEGQAKIIKEKTKPPARYNEATLLKKMESLNLGTKSTRALIIDILFKRNYVKGKSIYITPLGEKVIEVFEKYLPQIIDVELTRKMEEYLEKIEKGHLEYREKAIEEAKQIIKEVTKEIKEKEKEIGKELYDVYLKARNSQDSRSRKRGT

SEQ ID NO: 634 - DNA, 420 bp, Nanoarcheum equitans
atggaatataattattttgaattattagaaagggcctaccaaaaattgaaggatgtcattaaacaagaacaaattcgttggaatcctcctatcccacatatagaatatgtaaaaaaccgaactattataaccaattttaagcaaattgccaattatctaaacagagatccaaagataatagccaaattctttagcaaagaattatttgttcaaaccattatagaagggaatagcttaataataaataaaagggtttcttacgaaacaataaagaaaaaactcgacgaattcattaatattttcgttatatgtccagtatgcaaaagacccgataccgaattaatagaaagggggagaaaaatatattatattaagtgccacgcttgcgggagcgagagtcctgtgaattacgagctttaa

SEQ ID NO: 635 - protein, 139 aa, Nanoarcheum equitans
MEYNYFELLERAYQKLKDVIKQEQIRWNPPIPHIEYVKNRTIITNFKQIANYLNRDPKIIAKFFSKELFVQTIIEGNSLIINKRVSYETIKKKLDEFINIFVICPVCKRPDTELIERGRKIYYIKCHACGSESPVNYEL

SEQ ID NO: 636 - DNA, 630 bp, Nanoarcheum equitans
atgtttgatgaactaaaaaagcaattccttgaaagactagagagagaaaaacaattaggctatgtggataaacctataattcctttattagatttaataaatagttttgataattattttactttatccagttgttccgggagaatctctttatttgtagaagggggtaaaaaatacaatagctatccattattcaaaagccattatccagttaaagcggaagagctatatgaatattatataaattacaaaggagaaaagcctttgatatttaagtttgaaccttttattatacatatacaggctcgaactttgtatgatgggctaaaactattatctatagcccaaaagcttggattgaaatatagcgctttatttaatataaaattgtcagaccaaatatattacgacaaatacgaagtaaataacaaaaaatatggatttgaaagggtaattctgtatattatgggccacgacagaattgaaactattgtatacaaaaacaaacatctagttagcgaggaatatattaaagttttggttgaagaagccaatagaaaattgctaaaaaattgggcattaatagagagcctttataatgaaataaagaatttaaaagagaaccaatag

SEQ ID NO: 637 - protein, 209 aa, Nanoarcheum equitans
MFDELKKQFLERLEREKQLGYVDKPIIPLLDLINSFDNYFTLSSCSGRISLFVEGGKKYNSYPLFKSHYPVKAEELYEYYINYKGEKPLIFKFEPFIIHIQARTLYDGLKLLSIAQKLGLKYSALFNIKLSDQIYYDKYEVNNKKYGFERVILYIMGHDRIETIVYKNKHLVSEEYIKVLVEEANRKLLKNWALIESLYNEIKNLKENQ

SEQ ID NO: 638 - DNA, 342 bp, Nanoarcheum equitans
atgaaattggccgaactaatagaattaccaaaagagcaatgcaatgataaaaaatgcccacaccatggacatctaaaagttaggggattcttctttaaaggaaaagtaatcaaaaagagcgataacaaaactgttaaaatagagattattagatattattggttacccaaatatgagagatacgaattaagaagaactaggataacagcgtatttaccggaatgcttaaaagacataaaagagggagattatgtattaataggggaaacaagaccattatctaaaaccaaacattttgtagtattaggcaagctaaagaagggtatagctctaactcaatga

SEQ ID NO: 639 - protein, 113 aa, Nanoarcheum equitans
MKLAELIELPKEQCNDKKCPHHGHLKVRGFFFKGKVIKKSDNKTVKIEIIRYYWLPKYERYELRRTRITAYLPECLKDIKEGDYVLIGETRPLSKTKHFVVLGKLKKGIALTQ

SEQ ID NO: 640 - DNA, 237 bp, Nanoarcheum equitans
atgaaaccaataagggctttcatattaatacaagtaaaacctggctacgaaacaagtgttgcagaaactttaactagttatgatgaaattgaagaggcttatttagtttatggtgaatgggacatagttgcaaaagtcaaagccccaacaattggggaactaaaagatttaattgtgaaaaagataagaaccattcctggagtagaaatgacctctactctagttgttgttgagtaa

SEQ ID NO: 641 - protein, 78 aa, Nanoarcheum equitans
MKPIRAFILIQVKPGYETSVAETLTSYDEIEEAYLVYGEWDIVAKVKAPTIGELKDLIVKKIRTIPGVEMTSTLVVVE

SEQ ID NO: 642 - DNA, 480 bp, Nanoarcheum equitans
atgggtattggaataatgagcgatactgagttagcaagtttttccataaaaattcaatataaagggaatataaaggttttggatagctataattttctaataaattggctcaaacagaattttgatcctggttttaaggatttatcttttaataagctaaaaattagcgaagatagcttcgaatgcgaattagataaagataatacaatctattttgatccagattttggcaataaattcaaaataaaaataaatatgaaatgctctataaaaaagaacgaaatatcgatagaattaaaagaatataaactaattttggaatgccaaaaggattgtgacagattcaaagatttctataaaaatatacctttcataaaaagtttaatagaaaatatggccaattctatttttgttctattgaaagagcttgggaaaataaataatttcagcttttccgaaaggttactcaacaacaactag

SEQ ID NO: 643 - protein, 159 aa, Nanoarcheum equitans
MGIGIMSDTELASFSIKIQYKGNIKVLDSYNFLINWLKQNFDPGFKDLSFNKLKISEDSFECELDKDNTIYFDPDFGNKFKIKINMKCSIKKNEISIELKEYKLILECQKDCDRFKDFYKNIPFIKSLIENMANSIFVLLKELGKINNFSFSERLLNNN

SEQ ID NO: 644 - DNA, 498 bp, Nanoarcheum equitans
atgattataccaggaaaaatagctaaaaaatttgttagtgaatatgttaaagtaaaccctgcgggtatagatgttaaacctaaaaaggtattcaaaataaaggatttcgattacatttatttacatggtaacaaaagggggtttattattaacgataaattcgtagagctaagagagaatttagaagaaataaaacctatagatgattattgggttttagatgaaggtttgtattatgtagtgttccctgaagttgttatccctccatatatggttgcattagcattacctagaagttcgttaaatagattgggaatccaaaaatatgaaactgctttgtttgatcctggttataaaggggaatttactcaaacattttattttccaaagaaagctaaaattcatataaacgaagcatggatacaattaatttttatacaaatgctaatgccagcagaagagctttataatgggtattggaataatgagcgatactga

SEQ ID NO: 645 - protein, 165 aa, Nanoarcheum equitans
MIIPGKIAKKFVSEYVKVNPAGIDVKPKKVFKIKDFDYIYLHGNKRGFIINDKFVELRENLEEIKPIDDYWVLDEGLYYVVFPEVVIPPYMVALALPRSSLNRLGIQKYETALFDPGYKGEFTQTFYFPKKAKIHINEAWIQLIFIQMLMPAEELYNGYWNNERY

SEQ ID NO: 646 - DNA, 942 bp, Nanoarcheum equitans
atgagtgtaaaaaaatggcaagagcaattaaaaaatttcttaaacaatctagataagcatagtatattaataggggtagcagcagggataatattggctgtatcggcttatacagcctataattatagtttcacaaaaacggattgctcaaaagagatattggatagactatttccttcaaaaaattatgaaataaagagcatttcaaaaaaaggttctatatgtttgtacgatgttatagtgaagagtgagaaaggcaaagtagaagtagagatacccgttgtagatgattatataattggatcggcccaaaaaattggaaaattggaatttttatatataaaaagaactccaatatttgaaccaaatgttagcgatacccctccaaaagtagacttatatgttatggccaattgtccctatggtaatcgagcagaggacttattgctacctttgctaaataatacctcaatggacttccatgtccattatatggtatataacaaaccgttataccaagggcaaaagggctataaaataggaaatactactttttatgctttacatgggccagcagaggtattacaaagcgcttatgaagtttgtgtatacaataaatatggtataaagaaatgggcctcttttgttattgagttaaataaacatgcttttgaaataaatgatatagaaaaattaaagaaaatagctaaagaaaccgctaaaaaattgggtatagattggaatgttatagaaaaatgtgttaaagaggaagcagaaaaatatttgctaaaagatatggaattagtagaaaagaaacaagtagaagggagccccacattgtttataaatgatgtgttatatccagatatctatactaggaaagtgactactgaagatttaaggaaagcgatatgcgaatcctattctaaatgtgaaaaatga

SEQ ID NO: 647 - protein, 313 aa, Nanoarcheum equitans
  signal (1)..(36)
MSVKKWQEQLKNFLNNLDKHSILIGVAAGIILAVSAYTAYNYSFTKTDCSKEILDRLFPSKNYEIKSISKKGSICLYDVIVKSEKGKVEVEIPVVDDYIIGSAQKIGKLEFLYIKRTPIFEPNVSDTPPKVDLYVMANCPYGNRAEDLLLPLLNNTSMDFHVHYMVYNKPLYQGQKGYKIGNTTFYALHGPAEVLQSAYEVCVYNKYGIKKWASFVIELNKHAFEINDIEKLKKIAKETAKKLGIDWNVIEKCVKEEAEKYLLKDMELVEKKQVEGSPTLFINDVLYPDIYTRKVTTEDLRKAICESYSKCEK

SEQ ID NO: 648 - DNA, 270 bp, Nanoarcheum equitans
atgggcatatttgatatgtttaaaaaagaagaaaaagaaaaacctattgaagagccaatagaagaaaaaatcgatttgcctatgcaagaacaagaacaacaacaaatgccgttatatcaatatccccaacctccccaaccaaattttcaacccaatgaagacaaaatagagctaatcctagcgaaactagaaacaatagaagcctatataaagaatttagagaaaaggttggatacattagaattgttgttaaaacaaagatacttatga

SEQ ID NO: 649 - protein, 89 aa, Nanoarcheum equitans
MGIFDMFKKEEKEKPIEEPIEEKIDLPMQEQEQQQMPLYQYPQPPQPNFQPNEDKIELILAKLETIEAYIKNLEKRLDTLELLLKQRYL

SEQ ID NO: 650 - DNA, 843 bp, Nanoarcheum equitans
atgagcgaaaagaaagaacctgctaatatagcagtatacttaatagcttttctattattaatatggctatcaaatgtaatttactatttattgcaacctccaaaaagggtaaagaaattgctatacaacgaaagtgtctctaatggaaattgtactgtgtttaaagatatacttttatcggataaaggtattgaaatagatataaatcctactccaattgttttatataaaacaccaaaactttgcctaacttcttcgatatataatgtggatcaaataactttgtcagataaagaaggactattaagaatagaaaaaagtgatggccccattataattaaatccggtaataaaatagtatataaagggatagcagataatttggaattgcaaataaaagaaccaacaataacattagattatagtatatttccaaaaactatatgtttatacaacgttagttttacgcaaaacgaggtattatatataacatattcaccctacttgggaaaaccatatttatcgggcaattgtgttataaaaattaatggcgagctcgtttccgcttataatacacaaatacccataaagcttaaaattggcacaaacaaaatagaaatagttaattgcccttctggtaaaatagtttttgtcccaaatatggacaaactaaaaatagagggcaatgtaacaattaatgcagaattcgatggtactattgaagtttgttctaacaaatgcgaaacttatagcgagaaaattatcaatttaagagtaaagaacccaactttgatacccttaagaagaacctacataagagagatgtcaatatgttttaaatag

SEQ ID NO: 651 - protein, 280 aa, Nanoarcheum equitans
MSEKKEPANIAVYLIAFLLLIWLSNVIYYLLQPPKRVKKLLYNESVSNGNCTVFKDILLSDKGIEIDINPTPIVLYKTPKLCLTSSIYNVDQITLSDKEGLLRIEKSDGPIIIKSGNKIVYKGIADNLELQIKEPTITLDYSIFPKTICLYNVSFTQNEVLYITYSPYLGKPYLSGNCVIKINGELVSAYNTQIPIKLKIGTNKIEIVNCPSGKIVFVPNMDKLKIEGNVTINAEFDGTIEVCSNKCETYSEKIINLRVKNPTLIPLRRTYIREMSICFK

SEQ ID NO: 652 - DNA, 519 bp, Nanoarcheum equitans
atgaaagaagaatatgctatagtattagattataaccctactgaaggtgtagtatatgctgtgggaactaaattttttacattgctaaagctaaagcctaaaccagatgctgtaatagctcctttggaaaaagtatatgtaggaccaggaaaaagagataaaatccaatatataataaaaaggctaaaatacgacgaactaacggattttgctaaagaacaattagaaaaagccatagaacaaatagtaaaagagagagaaaaagagtttgtagaattctttaatatggctgggcctataactttaaggttgcattctttagagttatttgaaggaataggtaaaaaaaccgtaaacgaaataattagcgaaagagaaagagaaaaattcaaatcctttgaagatatagagaaaagaataccaaaactaaagaatatagtaaaaataatagctaaaaggattttagacgaattaagatgtaaagacaaataccatctatttacatctaggttttgttaa

SEQ ID NO: 653 - protein, 172 aa, Nanoarcheum equitans
MKEEYAIVLDYNPTEGVVYAVGTKFFTLLKLKPKPDAVIAPLEKVYVGPGKRDKIQYIIKRLKYDELTDFAKEQLEKAIEQIVKEREKEFVEFFNMAGPITLRLHSLELFEGIGKKTVNEIISEREREKFKSFEDIEKRIPKLKNIVKIIAKRILDELRCKDKYHLFTSRFC

SEQ ID NO: 654 - DNA, 630 bp, Nanoarcheum equitans
atgtattattataagttttggtattttaggccaaacaaagctatcgcccaactaattaaaggtaaatggatttcgaggacagataaatatgtttctgcgagagaaaactatttttatgggaatataccaaaagtattgccgaaaaatgtaattcttttaggagaagagccaataaataaggtgttatcaaaagaatataaatattttttgccaaaagataaagcaatagaacaaattagttatttacataaagttggaaacataattgtaagaaaaacaaaaataaaagtaaagggcttgcctaatttagatttaatgaaagaagcagcgaaacattttattggtaaaaaggattttactaattttactattgagagagaagcaaaaaacccattgtgtactataataaaattcgatatagaggaaagaaaagactattatgttttttcaattgttggggatagatttttataccatatggttcgaaaaataatttcttttatagtaagtgtaggctataaaatataccccttagaatatatcgatttggttttcaaagaaaggctaaacccaaaaccaaaagatgcagatccaaaatttctatggctatggaaaattaacaaaacctag

SEQ ID NO: 655 - protein, 209 aa, Nanoarcheum equitans
MYYYKFWYFRPNKAIAQLIKGKWISRTDKYVSARENYFYGNIPKVLPKNVILLGEEPINKVLSKEYKYFLPKDKAIEQISYLHKVGNIIVRKTKIKVKGLPNLDLMKEAAKHFIGKKDFTNFTIEREAKNPLCTIIKFDIEERKDYYVFSIVGDRFLYHMVRKIISFIVSVGYKIYPLEYIDLVFKERLNPKPKDADPKFLWLWKINKT

SEQ ID NO: 656 - DNA, 546 bp, Nanoarcheum equitans
atggatataatacaaggttatctgcattttattaaagtatttttagatctattattagcgccattaaagcatttagaattactttgggttgtaattcctatatatgtttcatggttgttagtagaaactttgcatcattttgaaaaagaagacataatctttaacgcaaacagctgcttttggatggggatggaatggggaaggcaaagcttttctaatctatcgaaagacccattttatttgttaggcttagaagcagctataactattataatttatggctttctaatattatggctatactttaaaagggtcgaatggttagtatatttgttagctagaagtagagagatatttttcctacaaatattggttactccaataatttattatcctaaagagtatgcatttgttttgggccatgatttatattctgctttagtgggactaatattagtgatattaggatttttcccgatggcccatattatgggagaaatccttaaaagaataggaattagattgctaagaaatgtattattataa

SEQ ID NO: 657 - protein, 181 aa, Nanoarcheum equitans
MDIIQGYLHFIKVFLDLLLAPLKHLELLWVVIPIYVSWLLVETLHHFEKEDIIFNANSCFWMGMEWGRQSFSNLSKDPFYLLGLEAAITIIIYGFLILWLYFKRVEWLVYLLARSREIFFLQILVTPIIYYPKEYAFVLGHDLYSALVGLILVILGFFPMAHIMGEILKRIGIRLLRNVLL

SEQ ID NO: 658 - DNA, 825 bp, Nanoarcheum equitans
atgctattagaaatagtggggatagaaaaactaaaaaactatttagaaaaagagctagaattggattttgattctattaaagaaagaataaactttgttgatacaaaagaaggagctttgcccgctattgattcctctattagagttatcccctttagagggaaccgcttagcactaatcgttggagcagtaatagttaataaagataacgattattataactctaatacaatgttaacagatgtagaggatgaaaatgttaaaacattagcaatgaaatataccgaatggcaactaattaacgaatacgatggaacaataataatagatggctctcctaacattgataaaagattattggaaaaatacgatttacctatagttaatgagtatagggatttaattaaagccaacttagagaaaacaatattttttgctaaaaagataaccaattggggaataaccaatatatttggagacgaatatatagtaagcaaatatattttagatttgctttctttgtattatttggagaagaaccaacctttctatatagaaggcagagacataatatttttcaataaaaaattcaaaactattttagcatatttcggaagaaacccatctttaatagttattagtcccaataatatggatttactagaaaacattgcgaattatactaattattatggagtatatgaaccaatagttttggccgatacaatagctaggcaatatagtaaactgttagctaaaaaactaataatagaagttggagaattaacaacagaaagagaaaaaacaatagaacaatggatataa

SEQ ID NO: 659 - protein, 274 aa, Nanoarcheum equitans
MLLEIVGIEKLKNYLEKELELDFDSIKERINFVDTKEGALPAIDSSIRVIPFRGNRLALIVGAVIVNKDNDYYNSNTMLTDVEDENVKTLAMKYTEWQLINEYDGTIIIDGSPNIDKRLLEKYDLPIVNEYRDLIKANLEKTIFFAKKITNWGITNIFGDEYIVSKYILDLLSLYYLEKNQPFYIEGRDIIFFNKKFKTILAYFGRNPSLIVISPNNMDLLENIANYTNYYGVYEPIVLADTIARQYSKLLAKKLIIEVGELTTEREKTIEQWI

SEQ ID NO: 660 - DNA, 198 bp, Nanoarcheum equitans
gtgctaccaccaattagatgttttagttgtggcaaacctttgggacatctatgggaagagtttaatgaaagggtaaataaaggggaagatccaaaaaaagttttagatgatttaggattggaaagatattgttgtagaagaacattattaagcgctgtagtagtatttccagtaatagctaaatttaagaaggtttag

SEQ ID NO: 661 - protein, 65 aa, Nanoarcheum equitans
MLPPIRCFSCGKPLGHLWEEFNERVNKGEDPKKVLDDLGLERYCCRRTLLSAVVVFPVIAKFKKV

SEQ ID NO: 662 - DNA, 582 bp, Nanoarcheum equitans
ttggtattaccttttctttatatgttatatgatatatggaaaaaccgaaaaaggggcccccaaagtttaatgttaaaagatataggctatattatagcgagagttctaccagaaaaggattggactatagtggaaataggtccaggctctggtagtttaactatgtatttagcttatttagtatacccaaacaaaataatagtttatgaaaaagacgatagatggatcccaatactaaaagaaaacctaagcaaagcaaatctcgataatgttattatcaaaaaaagagagataggtttagaaaatatagatgaagaagcagatctaattattatagatgtgaaaaatgttatagacgttgtaaagaaagttaaagataaggccaaaaaatatttagttatcttcgttatacattttgaaaagctttcccaattaatagatatattggatgggtttaataccgaaatagtttggttagaagagcatagggtaactaagacaccaaatggaacgagattcgagattagtggggtaaagtttaatggttttatagtgatagcagagaggactaaaccttcttaa

SEQ ID NO: 663 - protein, 193 aa, Nanoarcheum equitans
MVLPFLYMLYDIWKNRKRGPQSLMLKDIGYIIARVLPEKDWTIVEIGPGSGSLTMYLAYLVYPNKIIVYEKDDRWIPILKENLSKANLDNVIIKKREIGLENIDEEADLIIIDVKNVIDVVKKVKDKAKKYLVIFVIHFEKLSQLIDILDGFNTEIVWLEEHRVTKTPNGTRFEISGVKFNGFIVIAERTKPS

SEQ ID NO: 664 - DNA, 570 bp, Nanoarcheum equitans
atgggcaagaaattcttagtttttgattatgatggcactctattaaattctatccctattctagctcgatatatttacaaaaaagtttctccttttgttaaaaccgatataagagagatagaaaagctaataggttttcctatacacgttatagcttacgaattagctaaagatgaagataaagcaaaaacattaataaaacttatagatttgaaagaagcatttgaagaatacaaaaaagcttctttatactgggacgcaaaaatagcaatacctcaattgcataaaaattatagattggcaatattaaccgcaagtcccagatattttgttgaatcgactttgggagaatacaaaaaatatttcgatattattgatgacaggaaagaaaaaagtgatttgcttgataaaatagatgcaatagcttatgtaggagaccacatagtcgatatagaaatagggaaaaaatataatattccaacttatctaatagaaaggccccataatttacatataaaatataaacctaaactcaaaaatttgttacaattggttaagatattgaattaa

SEQ ID NO: 665 - protein, 189 aa, Nanoarcheum equitans
MGKKFLVFDYDGTLLNSIPILARYIYKKVSPFVKTDIREIEKLIGFPIHVIAYELAKDEDKAKTLIKLIDLKEAFEEYKKASLYWDAKIAIPQLHKNYRLAILTASPRYFVESTLGEYKKYFDIIDDRKEKSDLLDKIDAIAYVGDHIVDIEIGKKYNIPTYLIERPHNLHIKYKPKLKNLLQLVKILN

SEQ ID NO: 666 - DNA, 474 bp, Nanoarcheum equitans
atgataacaatagaggaaattatctatttattggttagttctttggttgttagcctaatatttagcccagaattaaaatgggatataataaaagagcaatttattattgcttttttatccataggtttacatgaattattccataaaataacagctttagctttaggctataacgcatatataacagttaattggtttggtttattgataggcctatttcttcgattaatagattttccaataatatttttcgttccagcaatggttgttattccttatataactaatccattacattattctttaatagctgttgctgggccattggctaatttgctattatatataatattcagagatagcccgataggctatatgaatttctatttatttatactaaacatgcttcctttgccgggcttggatggtttcaaatttttagttggtttaattcaatatcttaaccaattgtaa

SEQ ID NO: 667 - protein, 157 aa, Nanoarcheum equitans
MITIEEIIYLLVSSLVVSLIFSPELKWDIIKEQFIIAFLSIGLHELFHKITALALGYNAYITVNWFGLLIGLFLRLIDFPIIFFVPAMVVIPYITNPLHYSLIAVAGPLANLLLYIIFRDSPIGYMNFYLFILNMLPLPGLDGFKFLVGLIQYLNQL

SEQ ID NO: 668 - DNA, 1116 bp, Nanoarcheum equitans
atggcgaagtttgcccctgtacaatataaatatataataaaagccgaattcgaaatagatggtatagtagatagagaagatataattggtgcaatatttggccaaaccgaaggtttactagggatggaattagatttaagggaattgcaaaagcaaggcaaattgggaagaattgaagtagaatataaaagagtgggaaacaaaactattgggactattacaatacccacttctttaaaagcggtagagacttctctaattgcagcagcgatagagactgttgatagggttgggccagcaaaagcgaggtttagggtaaaagaaatagtcgatgttaggtcttctaagcgagaatatataaggaatagggctaaagagttgtttgttcaattattatcaaaaacggccccagatattgaagagttaagaagagaattggaagaagcatattattctaagcaactaatagaatacggagaagaaaaattacctgctggtccattagtagaaaaaagtgatgaaataatattggtcgaagggagagcagatgttgttaatctagtaaaacacggtatactaaatgtcttaggtatgaatggtattaacattcctaaaagtgttgtagagttatcaaaaagaaagaaagttactttattcatagatggcgataggggaggagaactagtattaagaaacttgttagctgcaggcgcagatatagattatgtggctgtagcccctccaggaagagaagtagaagagctaactaacaaagagattctaaaggccctaaaatcgaaaatacctttagagcaatacataaagaatttgcgcatatccattaataatgacgaaaacaaagaaaaatacaaagaattattatcaaaagttttcgatacaaagaaagcaatagtttttgatgagcaatttaacattatcgatgaaaagccattagaagagatagataaattgcccagcgcatatggaatagcaatagataaaatattagataacgaaacctacgcaaaaataaaaggcaaataccaattaatattagctttggattccaatgtaaatgcccaggaaagagtaataactttgaaagacatacaatga

SEQ ID NO: 669 - protein, 371 aa, Nanoarcheum equitans
MAKFAPVQYKYIIKAEFEIDGIVDREDIIGAIFGQTEGLLGMELDLRELQKQGKLGRIEVEYKRVGNKTIGTITIPTSLKAVETSLIAAAIETVDRVGPAKARFRVKEIVDVRSSKREYIRNRAKELFVQLLSKTAPDIEELRRELEEAYYSKQLIEYGEEKLPAGPLVEKSDEIILVEGRADVVNLVKHGILNVLGMNGINIPKSVVELSKRKKVTLFIDGDRGGELVLRNLLAAGADIDYVAVAPPGREVEELTNKEILKALKSKIPLEQYIKNLRISINNDENKEKYKELLSKVFDTKKAIVFDEQFNIIDEKPLEEIDKLPSAYGIAIDKILDNETYAKIKGKYQLILALDSNVNAQERVITLKDIQ

SEQ ID NO: 670 - DNA, 1026 bp, Nanoarcheum equitans
atggcttacctatttatacatttgaatggcctatatgttttagatgaagatggtactttattggaatataagccaatggaatttagtgaagaagaagcatacaaattaaaaaaaggaatattaccagaatcactaaaaggagaaattgacaaacttaaaagcaaatatgaattaaaaatattaggaagggcttataagggattagatttgcccttagatttaaacacaaaactaataaataaagctctattctatgcgagagaaaatgataatttctcttatattagagatgtgcaatacgaggtaacaataagagagctaagtgaaagtgttagccatgactggttaataatacaagcaataaaagctttggacgatactaataaaatattaaacttaatgatggaaaggtttagagaatggtatgaattatatttcccagaattaagtaaaaaatttgaagaccacgagcaatttgtgaaagcggtattagagaaaccgagagaagaatggttaaaagaattgggcttagacaaaacaatgggtggtaatatagatgaggaaagcaaacaaatattaatgactttcgctcaaagaataaaagatatgtatgaatttagaaagcaattacaaaattacataaaacaaatgatggagaggtatgccccaaatgtaacagctattgctggaccattagttggagcgaggttattagctttagctggcggtttaaaagaattagcttacttaccagcatcaactatccaagtattaggagcggaaaaggcattgtttaagcatttaactaaaggcacacccccaccaaaacatggagtattatttaaccatccatatgttcaaaaattgcctaaaaaattaagaggtaggatggcaagaactttagccgcaaaaattgctattgctgcaaaagttgatgcttttggccattacttcataggagataaactaaagaaagaaatagatgaaaggtttgaagaactaaaaaaagaagcggagaggctttaa

SEQ ID NO: 671 - protein, 341 aa, Nanoarcheum equitans
MAYLFIHLNGLYVLDEDGTLLEYKPMEFSEEEAYKLKKGILPESLKGEIDKLKSKYELKILGRAYKGLDLPLDLNTKLINKALFYARENDNFSYIRDVQYEVTIRELSESVSHDWLIIQAIKALDDTNKILNLMMERFREWYELYFPELSKKFEDHEQFVKAVLEKPREEWLKELGLDKTMGGNIDEESKQILMTFAQRIKDMYEFRKQLQNYIKQMMERYAPNVTAIAGPLVGARLLALAGGLKELAYLPASTIQVLGAEKALFKHLTKGTPPPKHGVLFNHPYVQKLPKKLRGRMARTLAAKIAIAAKVDAFGHYFIGDKLKKEIDERFEELKKEAERL

SEQ ID NO: 672 - DNA, 411 bp, Nanoarcheum equitans
atgagagacgactggtttagaaggttgttaagagatatctttatgttagaaagagatctattagagaactttgatatgggatttgattatgcaattccgggaatgcaaatgagagaaacagaaagctattacattattactataccattaccaggagtaaggaaagaagacattaatttatatttagatgggaacaatttggttattgatgtccactctaaggccaaagaagagaggaaagagaaaaacgaatatttcgttaatgtaggagagatacatttacatagggagataccattgccagcgaatgccgatcctaattctatagaagcagagtataggaacggtttgttagtaattagaataaagaaaaccaaccaattcagaggaagaaggatccctataaaataa

SEQ ID NO: 673 - protein, 136 aa, Nanoarcheum equitans
MRDDWFRRLLRDIFMLERDLLENFDMGFDYAIPGMQMRETESYYIITIPLPGVRKEDINLYLDGNNLVIDVHSKAKEERKEKNEYFVNVGEIHLHREIPLPANADPNSIEAEYRNGLLVIRIKKTNQFRGRRIPIK

SEQ ID NO: 674 - DNA, 519 bp, Nanoarcheum equitans
atgagagttctttttctattaacggatcatttttatgatgacgattttttagagttatataaaaggtttgaccaagataattacgatataaaagttgcaaccccgaaagggtatagtgtaacaggaataaaaaatactaaaattatgcccgattacaaatttgaggatttgtccccatataaacaattcgacatagctatattaataagctattatgattatgaaagctttaacgtaatagaattgaaagaattgataggctatctattaactaaaggcacagtggtagctattagaaccgctccaatatttttagcagagcaaaaactaattaagggcaaaaaaacaacttgggattatttagaatttcctcagtttgaacaatatctaagagaccatggagtaaacacaataaaaacagatttatttttcgatggaaactatataagttctaggggttgctgttatgatttgttatataaaataattaatttgaaagcaaaaggatttattttatag

SEQ ID NO: 675 - protein, 172 aa, Nanoarcheum equitans
MRVLFLLTDHFYDDDFLELYKRFDQDNYDIKVATPKGYSVTGIKNTKIMPDYKFEDLSPYKQFDIAILISYYDYESFNVIELKELIGYLLTKGTVVAIRTAPIFLAEQKLIKGKKTTWDYLEFPQFEQYLRDHGVNTIKTDLFFDGNYISSRGCCYDLLYKIINLKAKGFIL

SEQ ID NO: 676 - DNA, 1911 bp, Nanoarcheum equitans
atgaacccaatagaagttaaaaaaccagaaaatgtagaggcaaagcccaaagatttgtttacagagtatgtacaaaggaattccctagaagtattggaaaacgctaaccaataccctggtccaacaggtttcttcgcttatgtattagaaaaggcaatggaagaacatttaacaataatgccagagagaccattgaaagcacacttaaacaaagacatttatatacataagttacctttagcattatatgttccatattgttctggacattccttagcgagagtattagaaaaaggtatgattacaccaacagttatatctaaaccagctaaacatttcgatacatttgtagaccatgtagctaatttcttaataattgcacaacaacactttactggggcacaagcatttagctctgtagaatggtatgctggaccattcattagaaatgataggttagactacaaacaaataaaacaaaacatacaaagaatggtattcaacttaaactacccatctaggattggaatgcaatctccattcacaaacttcacagtaacaatggacgctgcaacctctatattagaaggggactatgcttattatgatggtaaaaaggttgccccattaggagaatacgaaaaagaagcaaaactattcttattagcattaactgaagtattaagagagggcgacgcaattggacaaccatttacatacccaataccaacattaatggcctctgccccaatgctatggaacgatccagaaatatatgaagcaatattcaaaactgcagcaaagaggggtagcttctattggttaaacacaaatgttgtcgatcccaatgcttctttcgcaatgtgttgtaggataaacatagataagaacgaattaaagttcgcatttagcgttaagaagaaagatgaagatgagagaataaaagagatagaaaaacaaagattcggtgggctatgggcaatgccagatgttactgggtctatacaagtaacaacaataaacctaccaaggttggcattagaagctaaagacgatgacaagttctgggaattatatgctgagaaattaacaatcataaaagaaatagaagactggttcagagaaagatatgtaaaactaataagaacacacaaagagatgtacaagttcttccattcctatctatgggacttcccaagctcacacttcaatacaataggtataataggcctaccagaagctgcagctatatatatgaataacccagaattatggttcgaaggttctaggaaagattggttagaagcagcgaaactaatgagagacatggtaagatttgcagtaaagtatgctagagaatggatgaaaatggatggcactccatggaatgttgaagaagtacccggcgaaagtgctgcagctaaattggcaatagctgatgctaagaaatacccagaagtattgaattatttaaacgatccagaaaacccaatatactcaacaagcgttgctccatattatggagcattagaattgtccgacagaataagaatagaatctatggtacaaccagaatttactggaggtgtaatgatgcacatattcttaggagaacaaccagaaccagatgcattagcggcattaaccaagaaaatactaaaaaccaaaatagtatattggtcattcactccagcaataacagtatgtaaccattgtaaaaagagctacactggtttgtacacacaatgcccatcctgtggtagcacagatgtagagatatggtctagaataataggttattacagaccattaaagaactggaacccctatagaaagaaagaattctggaccagagctcactatagtagagaatacatgaacgaaatgagaaaagaccaacaattcttctaa

SEQ ID NO: 677 - protein, 636 aa, Nanoarcheum equitans
MNPIEVKKPENVEAKPKDLFTEYVQRNSLEVLENANQYPGPTGFFAYVLEKAMEEHLTIMPERPLKAHLNKDIYIHKLPLALYVPYCSGHSLARVLEKGMITPTVISKPAKHFDTFVDHVANFLIIAQQHFTGAQAFSSVEWYAGPFIRNDRLDYKQIKQNIQRMVFNLNYPSRIGMQSPFTNFTVTMDAATSILEGDYAYYDGKKVAPLGEYEKEAKLFLLALTEVLREGDAIGQPFTYPIPTLMASAPMLWNDPEIYEAIFKTAAKRGSFYWLNTNVVDPNASFAMCCRINIDKNELKFAFSVKKKDEDERIKEIEKQRFGGLWAMPDVTGSIQVTTINLPRLALEAKDDDKFWELYAEKLTIIKEIEDWFRERYVKLIRTHKEMYKFFHSYLWDFPSSHFNTIGIIGLPEAAAIYMNNPELWFEGSRKDWLEAAKLMRDMVRFAVKYAREWMKMDGTPWNVEEVPGESAAAKLAIADAKKYPEVLNYLNDPENPIYSTSVAPYYGALELSDRIRIESMVQPEFTGGVMMHIFLGEQPEPDALAALTKKILKTKIVYWSFTPAITVCNHCKKSYTGLYTQCPSCGSTDVEIWSRIIGYYRPLKNWNPYRKKEFWTRAHYSREYMNEMRKDQQFF

SEQ ID NO: 678 - DNA, 900 bp, Nanoarcheum equitans
ttgctttcttctaaattattagatataaattattggaacaagtttggcaaacgattaataaacgaactaataaacttaatagagcaaatacccaagggctatgttaccacatttaaagaattggccaaagctttaggagacccaatagcaacaaagtttgtagcaatgtattataaaaaagctcctcattggtatagggttgtaagctctaatttaatagtaagccctatgcaaaaagctttgttagagaaagaagttaaaataataggaaacaaagtttatgccccaatatttaaggatttcaaatcgagcaaacctttattagaattgcaaaaaatacaggaatatttggtaaacaaaataaaatttgattatcccgaatatgattatgttattggaatagacattgggtacaaaaataatattatagccttagccatatttgacaaaaacaaaaagctaatagaaaccaaaacctgcaaacataatatagagtttccttatataccaacatatctatctttccgggaaggaatccctattgtaaatatactaaaagatttagactacactgccttatatataattaatggacatggcctttcccatcctagaaaaatgggcttagcaacttttgttggaaccgtcttagatttgcccacaattggagatgctaaaaaattgctatatgggaaaataaagaacaatataatttatgcccataatatgccagtcggttattttgttgggcattatgtaactattggaaatagaacaaatttagagtttctgaaagagtttataaaggaatggaattctaaaaaatatttattgcctatagaagtggcagataaaattaccaaatgcggccgcggggattcgaaccccggacgggactaa

SEQ ID NO: 679 - protein, 299 aa, Nanoarcheum equitans
MLSSKLLDINYWNKFGKRLINELINLIEQIPKGYVTTFKELAKALGDPIATKFVAMYYKKAPHWYRVVSSNLIVSPMQKALLEKEVKIIGNKVYAPIFKDFKSSKPLLELQKIQEYLVNKIKFDYPEYDYVIGIDIGYKNNIIALAIFDKNKKLIETKTCKHNIEFPYIPTYLSFREGIPIVNILKDLDYTALYIINGHGLSHPRKMGLATFVGTVLDLPTIGDAKKLLYGKIKNNIIYAHNMPVGYFVGHYVTIGNRTNLEFLKEFIKEWNSKKYLLPIEVADKITKCGRGDSNPGRD

SEQ ID NO: 680 - DNA, 237 bp, Nanoarcheum equitans
atggaaaagaaagtttttgttgttgagggttatgcaaagaaaggctctctaaaatttagatttaagaagtatttcatagcattaaagaaagaagatgctatattctatacttactcaattttagggagtaaccataaactaaagaaaacccaaatccatatagaaagggtatacgaattagatccagagaaagacaaagataaattgccagacaaaagactacttgctttcttctaa

SEQ ID NO: 681 - protein, 78 aa, Nanoarcheum equitans
MEKKVFVVEGYAKKGSLKFRFKKYFIALKKEDAIFYTYSILGSNHKLKKTQIHIERVYELDPEKDKDKLPDKRLLAFF

SEQ ID NO: 682 - DNA, 801 bp, Nanoarcheum equitans
atgggattcgcagctggtaagttttatccatccaatagggaacaactaatagctttgctaaacgaattatttaaaggactaaaaaaagagtattcattaaaagcaggcatagttcctcatgcaggctatatatattccggtaaagccatggcagaattctggattaatagcgatagaaataaaacctatgcaataataggaacaaaccatacaggtttagggagcttggctaatgtatctttaatgcctatagaaaccccattaggcatagccaaaatagatgaagaggcagcgatgatatttatgaaaaatggcttcgattatgatgataggccatttttatacgagcatagtgtagaaaaccaaatcccatttttacaatatttgcatggagataatttcttaatagtgccatcggttatgtttaatgtatatagatttgcaaaagaagttggtaaacaattagcattggaattgccagaaagggttagattagtggcttcgagcgattttactcattatggtgacatatatggatataaaccctttagcgatggaagaaaagttaaagaattagatatgaagctaataagctatatactaaaattagatagcctaggattttataaagaaattgtaaggactggcgctaccgtatgcggttggggacccatagtttctgtaatagagtttgctaaagaaaggggtttggaaccaatactattagattattatacaagtggtgatgttactggggattattcgttagttgtagggtatgcatcaataatttttgtataa

SEQ ID NO: 683 - protein, 266 aa, Nanoarcheum equitans
MGFAAGKFYPSNREQLIALLNELFKGLKKEYSLKAGIVPHAGYIYSGKAMAEFWINSDRNKTYAIIGTNHTGLGSLANVSLMPIETPLGIAKIDEEAAMIFMKNGFDYDDRPFLYEHSVENQIPFLQYLHGDNFLIVPSVMFNVYRFAKEVGKQLALELPERVRLVASSDFTHYGDIYGYKPFSDGRKVKELDMKLISYILKLDSLGFYKEIVRTGATVCGWGPIVSVIEFAKERGLEPILLDYYTSGDVTGDYSLVVGYASIIFV

SEQ ID NO: 684 - DNA, 228 bp, Nanoarcheum equitans
atggcgaaaagaaaatacccattcccagtcgcgccattgtataggataatgagacaagcaggtgcaaagagagtaacaaaggatgctaaagaagcttttgtagaagttgccgtagagattgctaagagagtagcaaggagagctgcagaattagcaaaacacgcaaaaagagtaacagttaaagaacaagacgttagattagctttagaagagctaaggggtttataa

SEQ ID NO: 685 - protein, 75 aa, Nanoarcheum equitans
MAKRKYPFPVAPLYRIMRQAGAKRVTKDAKEAFVEVAVEIAKRVARRAAELAKHAKRVTVKEQDVRLALEELRGL

SEQ ID NO: 686 - DNA, 1803 bp, Nanoarcheum equitans
atgccaatggattttaaaactactgaagaaataaaagttccaaaaaaattgatagaccaaattattggccaagataaagctgtcaaattagctaagatggctatccaaaatagaagacatttgcttctaatcggccctcctggtacaggtaaatctatgctagctaaagcaatggcagagcttttacctaaagagggtttagaggatttcttagcttttcctaatccgaaagatgagtttcaaccaataattaaaactgtcccagcaggggaaggtaaaaaaatcgttgaaagaagtaaaattgctgctttaaatgccctaaaggggaaaaatcaattaacagcaataatcgctttaatagcattgttaatgcctttctatttttactatactggcgaaaaaattcttgctgcggcatcgatgataatgtcttctattttgttagtaggcttatcattaggatttaatgtaatgaataagagaaaattattggaaagtatacccaaactattaatagataattctgacaaaaaacatgcgccattcgttgatgcaaccggggcaaatccatctcaactattcggtaatgttttacatgacccattccaaagcgggggtttagaaacccctgcccaccatagagttgtaccaggtttaatacataaagcacataaaggagttttgtttattgatgaaatagctactctcccatgggatgttcaatacgaattattagtagcgatgcaagagaaaaaatatcctatatttgggagagatgaaagaagtgggggctcaatagtaagaaccactcctgcaccatgtgattttattttggtagcagcaggtacagaggaagctataaaaaatatgcacccagctttaagatcccgtatcaaagggaatggtttcgaagtttatatgaatgaagacatgccagataccccagagaatagggaaaaactcgctaggtttgtggcacaagaaataatgagggatggcaaaataccacattttactagggatgctgtagaagaaataataaatatagccaaaaaattagcgggaagagaaggatatctaacattaaggcttagagaattggggggctatgttaggttggcaggagatatagcaaaaagcaaaggtaaaaaatatgtaactaaggaagatgttatagaagcggaaaggataggccaatctatagaggaacaaatcgtggaaagaattaaagaacttaggagaaggtatgacatagtaataaaagaaggatacgaaattggtagagccaatggcataggcgttattggaaacaaaggggtaataataccaatagatgttaatgttgcctatggaaatggcaaaataataacttctggtattttaggaaaaatagcagaacaagcaataaaaactatcgaaggctatgtaaaaagcgtctttggtaaggacataaaagagtatgacatttatgtgcaatttgtacaaacttacgaagaaatagaaggggactctgcttctttggctatcgctttagcaaccataagtgctttaactaaaaccccattagatcaatcctttgtaattacaggcagtatagatgttaaaggtagggtattacccgtggggggaataatacctaaaatagaaggggccatcgaagaaggttttaagaatatcattattcctaaacaaaacctaaaggatgtaccaaaagagtatttcaataatattaatatatatggggtatcgaccatagacgaagctcttaatttggttggggcgaaaccagacaaaaagctttaa

SEQ ID NO: 687 - protein, 600 aa, Nanoarcheum equitans
MPMDFKTTEEIKVPKKLIDQIIGQDKAVKLAKMAIQNRRHLLLIGPPGTGKSMLAKAMAELLPKEGLEDFLAFPNPKDEFQPIIKTVPAGEGKKIVERSKIAALNALKGKNQLTAIIALIALLMPFYFYYTGEKILAAASMIMSSILLVGLSLGFNVMNKRKLLESIPKLLIDNSDKKHAPFVDATGANPSQLFGNVLHDPFQSGGLETPAHHRVVPGLIHKAHKGVLFIDEIATLPWDVQYELLVAMQEKKYPIFGRDERSGGSIVRTTPAPCDFILVAAGTEEAIKNMHPALRSRIKGNGFEVYMNEDMPDTPENREKLARFVAQEIMRDGKIPHFTRDAVEEIINIAKKLAGREGYLTLRLRELGGYVRLAGDIAKSKGKKYVTKEDVIEAERIGQSIEEQIVERIKELRRRYDIVIKEGYEIGRANGIGVIGNKGVIIPIDVNVAYGNGKIITSGILGKIAEQAIKTIEGYVKSVFGKDIKEYDIYVQFVQTYEEIEGDSASLAIALATISALTKTPLDQSFVITGSIDVKGRVLPVGGIIPKIEGAIEEGFKNIIIPKQNLKDVPKEYFNNINIYGVSTIDEALNLVGAKPDKKL

SEQ ID NO: 688 - DNA, 312 bp, Nanoarcheum equitans
atggattcaaaggattcaaagaaacctactaaagaagaaatatacgaagtgctaaaaacagtgatagatccagaaatcggttacgatgttgtttctttgggagaaatagacgatgtaataatagaaaacgacagaatcctaataaaattcatacctactactcctttatgtccttatttaccatacatgtttgatgaaatacaaacaaaaataaaagaaaaatttggattagacgtcgaatttgaaatatctgataagccatggtctatagatagagtaaacccagaggttagaaaaaagctaggtctataa

SEQ ID NO: 689 - protein, 103 aa, Nanoarcheum equitans
MDSKDSKKPTKEEIYEVLKTVIDPEIGYDVVSLGEIDDVIIENDRILIKFIPTTPLCPYLPYMFDEIQTKIKEKFGLDVEFEISDKPWSIDRVNPEVRKKLGL

SEQ ID NO: 690 - DNA, 210 bp, Nanoarcheum equitans
atgggtttaactcaaaatgagatagcttatttgttagaaacgacacaacctgctgtatctaattatattagaggaaaaagaggccaaatacaatataaagatttagaagaaaaatcagagataatcaaagagatggccgaaaggatggctaaagagaataaaaaattaaacgagatattatgtgaatattgtccgaaacttgttggttaa

SEQ ID NO: 691 - protein, 69 aa, Nanoarcheum equitans
MGLTQNEIAYLLETTQPAVSNYIRGKRGQIQYKDLEEKSEIIKEMAERMAKENKKLNEILCEYCPKLVG

SEQ ID NO: 692 - DNA, 630 bp, Nanoarcheum equitans
atgtatactatagctaactctatcgcttatgctataattttcctatttttgatcccctatttattatataaacttgggatagatgttgaaaaagaaacaacaaagttttttccgttaatattaagttttttgttcataagggtttttgttgatattaatttgttgcccaatactttttttactgttactccaggggtttggattttggggataataacctattttattgcaaggaaaatccctataatacaatgggttttattttttgcaacattgttcgtttatgctttttatgttaatattgatataaaagttttggttttgttgctatatttttttggtttgtctttaataatattgtgtcctgtatttttaatagacaaaaaaattgctttggcacattctttagatatcgcaaccacttttgtgggtttaacctatttaggattaaaagagaaacatgttttgtcttctctaattggagagccattttttattggattctttaaaatggttgtattatatgtattattaaaaacctacaacaaaccatacataagggcttcgatttttgttttaggtttattaacaggggggagaaactttttgatagaaatagctttaaaatag

SEQ ID NO: 693 - protein, 209 aa, Nanoarcheum equitans
MYTIANSIAYAIIFLFLIPYLLYKLGIDVEKETTKFFPLILSFLFIRVFVDINLLPNTFFTVTPGVWILGIITYFIARKIPIIQWVLFFATLFVYAFYVNIDIKVLVLLLYFFGLSLIILCPVFLIDKKIALAHSLDIATTFVGLTYLGLKEKHVLSSLIGEPFFIGFFKMVVLYVLLKTYNKPYIRASIFVLGLLTGGRNFLIEIALK

SEQ ID NO: 694 - DNA, 1785 bp, Nanoarcheum equitans
atgaactggccgtattggctggatttcaaagagccataccaaaatgagaaaggggaatgggtgtgcccatattgtaaggaaactttccctactaaagaagatgcttatcctagattaattatgactttaggcagttaccaaagattatatagagagtatcccgatttgagaactttccttgaagaacaatggcgctcttctgatggacatccctgcccccaatttactagatatttctggaaaagatataatgaaagatggaaagatatagaaataaaatcaaggctttctgaggaatctcaatcaacagaggaaattgagaaaaaagaagggattatcaatgatgcattagaaacagttaggcgcatatctcctgtagaaagaaaaccgatgcatagcccaacaacaaaaatagaaaagaagaaagggaatagaaaatatgaaaagagaaaagctgagaagaaagtagaagaggggaaagttgtttacgagagtgctggtatttcaaaagcagtaatagcaatagcagtagcattagcagcagtagtaggttttgttatacttaacaatgaacttcatattagcgataagatacttaaatactatagcgttttaaataaaaacaaaagcgttgcaaaaattgaacataagatggatatagaggatgtaaaaatatatccaagcgaaaatattgaagaacaatattctgaaaatgataaatatcccgaatgtgatgaatacggagaaaacagcaattatccccatataataccagcttgtaattacaaaggacacatctcgatagtgcgctttttcttattaggagataggtggtacagtattaaactaaatattagcaaatctatatactatggcgcaaaaaatggttttaaaagttatcgttattattgtataggcgatgcttgtatagaagaaaaagattgggaaaccaaatattataaagcatttattttcgacccccatcaaaaagacatattcaaagcaattatacgacaattagatttatattcatggagggatgagaataggtttgtagagctagctacatcttttgtacagaacattccttatgattatgataaatactataacaaatcaggaaatacaagatttccagttgaagttttagtggataataaaggagtgtgcggagaaaaatcccttctattagcaggaatattagcatatgctggctatgatgtagtattatttgaattcaaaaaggaaaaccatatggcagtaggcataaaatgcccatgtaagaatactttccgaggtacaggatattgctatatagaatcaacaagccttacccctatagggtatgttccagaagaatttataggtggaataaaactaagaagtaaacccaaaataataaaagtatccgatggaacaaaaatgtatactaattgtaagtatatcgattaccctcccacgtattataaaaatgaaataatagaaaaagtaagaaactatctagaaagcaattatgatttggtttacgaggaagagttaactagaagtataggaaaaaaatatttgcctcctgggtacacctctggtactacatggagaatccctattaaaggagggcatccagattttatattagcaaatttcataaaatgccatgtaaaagggaaatgtgataaaaatagatcaaaaggattagatgaaagtttaagtagatatcactattttggggtagacataattgaggaaggtggaaaatactatttaaccttattattagcaaattag

SEQ ID NO: 695 - protein, 594 aa, Nanoarcheum equitans
MNWPYWLDFKEPYQNEKGEWVCPYCKETFPTKEDAYPRLIMTLGSYQRLYREYPDLRTFLEEQWRSSDGHPCPQFTRYFWKRYNERWKDIEIKSRLSEESQSTEEIEKKEGIINDALETVRRISPVERKPMHSPTTKIEKKKGNRKYEKRKAEKKVEEGKVVYESAGISKAVIAIAVALAAVVGFVILNNELHISDKILKYYSVLNKNKSVAKIEHKMDIEDVKIYPSENIEEQYSENDKYPECDEYGENSNYPHIIPACNYKGHISIVRFFLLGDRWYSIKLNISKSIYYGAKNGFKSYRYYCIGDACIEEKDWETKYYKAFIFDPHQKDIFKAIIRQLDLYSWRDENRFVELATSFVQNIPYDYDKYYNKSGNTRFPVEVLVDNKGVCGEKSLLLAGILAYAGYDVVLFEFKKENHMAVGIKCPCKNTFRGTGYCYIESTSLTPIGYVPEEFIGGIKLRSKPKIIKVSDGTKMYTNCKYIDYPPTYYKNEIIEKVRNYLESNYDLVYEEELTRSIGKKYLPPGYTSGTTWRIPIKGGHPDFILANFIKCHVKGKCDKNRSKGLDESLSRYHYFGVDIIEEGGKYYLTLLLAN

SEQ ID NO: 696 - DNA, 246 bp, Nanoarcheum equitans
atggggctatttgatagcaaaaagataactatcgaagatgtttataaaaaaattgaagagaatggcaaatcattagaagaaaaaatagatacactaaataaaaaaattgaatctatattagaaaagcaagattctgagaaacaactaatagaaaatctaataaaagagataaactatataaaaaatgagataaatgacataaagcttttgttggaatatataaaaagctatcttaaaatgaaatag

SEQ ID NO: 697 - protein, 81 aa, Nanoarcheum equitans
MGLFDSKKITIEDVYKKIEENGKSLEEKIDTLNKKIESILEKQDSEKQLIENLIKEINYIKNEINDIKLLLEYIKSYLKMK

SEQ ID NO: 698 - DNA, 420 bp, Nanoarcheum equitans
atgattgagcgtaagcttaagaggggtttaagattagccaaatttaaagaaacaaaaatactaatttacgaccaattctctaaaaatatatatgaaatgttaaaacctatttatgaaaagtccagaaaaaaacttatccctatagaaggggaattcgatttaaattttgatggatatattcccataggtacagaggaagtagtagcatatatgtataaaagttttttcgaagacattccatttaataaaaaattagtttatgacaacccagcagtatttgttagatataaagatttcaatatggaaatgcccatgctttttggaaatgcctctttttttgtgaaaaagctaatagaaagaagagagaaaactgtgtatgcatctcttaggtctttgttagatttgattgatcttatttaa

SEQ ID NO: 699 - protein, 139 aa, Nanoarcheum equitans
MIERKLKRGLRLAKFKETKILIYDQFSKNIYEMLKPIYEKSRKKLIPIEGEFDLNFDGYIPIGTEEVVAYMYKSFFEDIPFNKKLVYDNPAVFVRYKDFNMEMPMLFGNASFFVKKLIERREKTVYASLRSLLDLIDLI

SEQ ID NO: 700 - DNA, 279 bp, Nanoarcheum equitans
ttgttgaggcacaatataacattacaagaattcatagaggcaatagatggaaattgcattagtatagaacatttagctaaaaccttagatatagatttgaaactagcatacaaactattagaaaaatcgataaaaattctaaaaaggaaaggtaaaaaaatcaaaatatacaaagcccaatgcaaaaaatgcgggtttgtatttgataggctaaaccccactaaatgtcctagatgtgggtctatgtggatagaaagagaaataatttgtgttaaataa

SEQ ID NO: 701 - protein, 92 aa, Nanoarcheum equitans
MLRHNITLQEFIEAIDGNCISIEHLAKTLDIDLKLAYKLLEKSIKILKRKGKKIKIYKAQCKKCGFVFDRLNPTKCPRCGSMWIEREIICVK

SEQ ID NO: 702 - DNA, 663 bp, Nanoarcheum equitans
atgaagttttttgagaactctataaaattgggtaaaaacttaataataagcgatatccatttaggattggaagacacatataacatagcagggaaccaaatacccatattggtagaaaagctaatagataaaataatagaattgcaagaaaaaaccaaaactaaaaggctaataattaatggagatttaaagcatagcttttctccaataaaagaagagtttatagttttggattattttttcaaaaggttaggcgattatttcaacgattttattattattaagggcaaccacgataccggtatagattggttatccaaatatggcgatgttttggaatataaaaaattgtatggctacacaattacacatgggcataaaaaaatagaggggaaaaaatttattataggacatgaacacccaattttaaagcttagagatgaagtaggtgctactattagagtgaaaacctttttggttagcgataatgttatagtattgcctgcatttagcccttggtcttatgggaatgatatattgcaacatactgtaagcccgtatacaaaaaatatcgaaaattttagagctttagtttatttagatggggaattattggatttcggtagaattagtgaaatattaaaagcgattaaatctttttga

SEQ ID NO: 703 - protein, 220 aa, Nanoarcheum equitans
MKFFENSIKLGKNLIISDIHLGLEDTYNIAGNQIPILVEKLIDKIIELQEKTKTKRLIINGDLKHSFSPIKEEFIVLDYFFKRLGDYFNDFIIIKGNHDTGIDWLSKYGDVLEYKKLYGYTITHGHKKIEGKKFIIGHEHPILKLRDEVGATIRVKTFLVSDNVIVLPAFSPWSYGNDILQHTVSPYTKNIENFRALVYLDGELLDFGRISEILKAIKSF

SEQ ID NO: 704 - DNA, 435 bp, Nanoarcheum equitans
atgtataaattataccctatagaagttgctaaaaataaaataggggaaaaagttttaatagcgggtatttgtatagagaggaacgattatattttaatagatgatggaaccgaaactattaaatgctatccaaggaaagcagatgtagatattggagattatgtattggttgcaggcaaagtaggagaagacataattttcgttgatggaatggggaaaatatccaaacaattatacgaatatttaaaagagcacatagaacaagaggatagagatttgcgaaacaaaattttggaatacatcgatataaatgatggtgctactttagagcaaatagtaaaagtatttggagaagaagcaaaaaagcatatacaaaaactattagctaggggagaaatatatgaatacgaacctggaaaattcaaaaagatttaa

SEQ ID NO: 705 - protein, 144 aa, Nanoarcheum equitans
MYKLYPIEVAKNKIGEKVLIAGICIERNDYILIDDGTETIKCYPRKADVDIGDYVLVAGKVGEDIIFVDGMGKISKQLYEYLKEHIEQEDRDLRNKILEYIDINDGATLEQIVKVFGEEAKKHIQKLLARGEIYEYEPGKFKKI

SEQ ID NO: 706 - DNA, 267 bp, Nanoarcheum equitans
atggccgagaaaagagaggatataccaactaatgttgtaaaaggcgatactgttatttggtctaaggcttacccagcgagggttgtagagatagtaggaagaacaggaactactggagaagtaacccaggttatagttgaaatcttagaaggcaaagacgcaggaagattaataagaagaaacgtaaaaggtccagttagagttggcgatatattaatgttgagagaaaccgaaatagaagctaggcccttagaatacagcaaataa

SEQ ID NO: 707 - protein, 88 aa, Nanoarcheum equitans
MAEKREDIPTNVVKGDTVIWSKAYPARVVEIVGRTGTTGEVTQVIVEILEGKDAGRLIRRNVKGPVRVGDILMLRETEIEARPLEYSK

SEQ ID NO: 708 - DNA, 717 bp, Nanoarcheum equitans
atgggtaaggttagactattagtacaaagaaggggtagaggttctccaacatttagaagcccaacccatagagctgctggaaaagttaaaataccaacctttgatggggatttagtaaaaggaaaagttgttgctttgattaaggattctatccattatgctccattgatggttgtaaaatgggaaaacggagcccaatcattattgccagccccattgggaatatctgtaggggatactgtatactatgggaaagaagcccctaatgcaataggttcaataaaaccattaagcgaaatacctgaaggtactaaaatatatatgttagagaacaacccaggagatggaggtaaattagtaagagctagcggagatttcgctttattggtacaaaaattaggagacaaagttatagtccaattaccaagtgggcagtttaaaacactaagcgcaaatgccagagctgttattggtgtaatcgcaggaggaggtagaaaagaaaaaccattcgttaaagctggtaataaatattattgggcttcctctagaaatagacattggcctgtagtcaatggagttaaaaagaacgcttccgaccatccatttggaggtaaaaggcattcaaaccattccaagccattcacagtatctaaatgggcaccaccaggaaggaaagttggttatattggagctagaaaaacgggtagagggaagtag

SEQ ID NO: 709 - protein, 238 aa, Nanoarcheum equitans
MGKVRLLVQRRGRGSPTFRSPTHRAAGKVKIPTFDGDLVKGKVVALIKDSIHYAPLMVVKWENGAQSLLPAPLGISVGDTVYYGKEAPNAIGSIKPLSEIPEGTKIYMLENNPGDGGKLVRASGDFALLVQKLGDKVIVQLPSGQFKTLSANARAVIGVIAGGGRKEKPFVKAGNKYYWASSRNRHWPVVNGVKKNASDHPFGGKRHSNHSKPFTVSKWAPPGRKVGYIGARKTGRGK

SEQ ID NO: 710 - DNA, 1299 bp, Nanoarcheum equitans
atgcccatggatgtagagcaaataatggaatatgcaaagaaagtagatgagaaaaccaactcaataattacttttaataatgagcttatagaaaacccttcttttattgttactataaaagataatattgttacaaaaaaccttagaactactgctggtagtaagatgttagaagattatatccctccctatgattcctttgttagcgaacaattaaaaaaggccaatgccctaattattggaaaaactgctatggacgaatttggttttggtagttttggtgtaaatagttgtattaaagttgcgagaaacgctttagacccaaatagggttgctgggggctcttcctcaggagctggagcatttacagctttgttcaataaaaaatatgataaccatgttgcgatagctgtatctaccgggggatctatatccaatcctgcagcttttaattcggtaattggtattacccccacttatggtttagtatcgagatatggattaatagattatgccaattctttagataaaataggagtaatgggcactaacatagattatatgaaaaaggtattagagataatagccaaacccgatccaagggatcaaacaaatgttggattgaaagagcctataaaatatatagataaaaaattcactattggagtaataagagtagatgttgatgaaaaaatagaaaaggctttttacaatttcgttagcgagttggaaaaagaatacaaaatagaagaaatagagttcccattatttgatatagctttagctagttattatattatagccatggccgaagcctctactaatttagcgaggtatggaaatatattgtttggctatagtgtaaacccaaaaggcaaacattatgatgaattctatatggaatctagagaattattttgtgaagaaaccaaaagaagaatattagttggcactttggtaagaaccaaaggattcaaaggcaaatactatgaaaaagctctaatagggaggaaaaaggttatagaagagtataaaagattattcaaaaaattcgatttgctattaacaccaacaatgcctatattgcctccaaagtttaaagaattggaaagcttaaaacctataaatatttatagaatggatatattaacggtacctcctaatttagcagggctcccacatatgtcatacccaatagacaaattcataggagcgcaatttatagcaaaccattttaatgaaagctatttgttttctatagcaaaaattttgtctacttccctctacccgtttttctag

SEQ ID NO: 711 - protein, 432 aa, Nanoarcheum equitans
MPMDVEQIMEYAKKVDEKTNSIITFNNELIENPSFIVTIKDNIVTKNLRTTAGSKMLEDYIPPYDSFVSEQLKKANALIIGKTAMDEFGFGSFGVNSCIKVARNALDPNRVAGGSSSGAGAFTALFNKKYDNHVAIAVSTGGSISNPAAFNSVIGITPTYGLVSRYGLIDYANSLDKIGVMGTNIDYMKKVLEIIAKPDPRDQTNVGLKEPIKYIDKKFTIGVIRVDVDEKIEKAFYNFVSELEKEYKIEEIEFPLFDIALASYYIIAMAEASTNLARYGNILFGYSVNPKGKHYDEFYMESRELFCEETKRRILVGTLVRTKGFKGKYYEKALIGRKKVIEEYKRLFKKFDLLLTPTMPILPPKFKELESLKPINIYRMDILTVPPNLAGLPHMSYPIDKFIGAQFIANHFNESYLFSIAKILSTSLYPFF

SEQ ID NO: 712 - DNA, 771 bp, Nanoarcheum equitans
atggatcctgaaaagaccgctatagtatacaaatttgcccagcaagtttatgaaaaattaggcattctattaaaagcagtaatattgtttggttctgcagcggaagaaaaagataaagaacaaagtgatttggatgttttactaatattagatgatttagcaacagattgggaaatggtaaaaccagtaatagagaaatatttagattctttactaaaaaaggaagaatttagcaaaatacatctaaatgctgtgacattatctttcttttggagagcaataattaaaagagatccaatagctattaatattattagggtaggaattcctatttttgatagcggtttctttagcccattgaaaaaactattgagtaccggtttattgggcccaacaagagaaactattttggattatgctaataaagttgaatatgattatggttcttatttgggatataaaattaaagctttggaatttttgtattgggtttttacccatagcgcgcaagcagctattatgttattgtataatgaaataccccctccaaaatatgttcctatgtatcttaaaaaaatggaaaacgaaaaaattattcctaaaccttatgcaaaatggtatgaagaaatatattcactaataaaaaagatctcacatggagaaataacaaattttgattcttgtttattagacaaatgggaaaaaagggcaaaaactttcgctaagaaaatggaagagattatatctaaaaatcttaaaaaggccctataa

SEQ ID NO: 713 - protein, 256 aa, Nanoarcheum equitans
MDPEKTAIVYKFAQQVYEKLGILLKAVILFGSAAEEKDKEQSDLDVLLILDDLATDWEMVKPVIEKYLDSLLKKEEFSKIHLNAVTLSFFWRAIIKRDPIAINIIRVGIPIFDSGFFSPLKKLLSTGLLGPTRETILDYANKVEYDYGSYLGYKIKALEFLYWVFTHSAQAAIMLLYNEIPPPKYVPMYLKKMENEKIIPKPYAKWYEEIYSLIKKISHGEITNFDSCLLDKWEKRAKTFAKKMEEIISKNLKKAL

SEQ ID NO: 714 - DNA, 273 bp, Nanoarcheum equitans
atgccagaggtattcatcgggaaaaagccattaaccaattatgtaatggcagtagtaatgcaattcatgcaaggcgcaaacgaagtagtaataaaagcaagaggtagaaacatttctagagcagtagatgtagcagaaagagtaagaaaaagattcttagctggccaagtagatgttggagacataaaaattgattctgaagaagtagtagacccagcaacaggacaaaaaaggacagtatcaacaatagaaataaaattagttaagaaataa

SEQ ID NO: 715 - protein, 90 aa, Nanoarcheum equitans
MPEVFIGKKPLTNYVMAVVMQFMQGANEVVIKARGRNISRAVDVAERVRKRFLAGQVDVGDIKIDSEEVVDPATGQKRTVSTIEIKLVKK

SEQ ID NO: 716 - DNA, 240 bp, Nanoarcheum equitans
atggaatatactgtaaatttaagaaaagctgtattagttacttctaggtttaaaagaacaaaaaaggcggtaaaggcattaaaagagtttgtaatgagacacacaaaagcgaaaatagtaaaaattagccaagagctaaataaattcatatggaaaagaggtggaagaaaaccaccaaccaaatttacaatagtagtaacgaaagaaggagatacagcgttcgttgatctaaagaaataa

SEQ ID NO: 717 - protein, 79 aa, Nanoarcheum equitans
MEYTVNLRKAVLVTSRFKRTKKAVKALKEFVMRHTKAKIVKISQELNKFIWKRGGRKPPTKFTIVVTKEGDTAFVDLKK

SEQ ID NO: 718 - DNA, 1173 bp, Nanoarcheum equitans
atgaaaaagctattctgggttttagccatacctttagcattgtccgcagtacagctaaaaggcgaactaaagggcgataataataaaatcgagggaaatgctgaaattaatgtaactataccaataccaaagaaaccaaaaatatattgcatacaagtatataaaccagttaaatgtgaactagaattacctaatggggaaaaaatagaaaaagtttttggaaacgattgtattgctaaaacatatgcatcacaacacaatgctaaaataataaaatgtgaaccaatgctagaaaaattagaagataataatgaagaagaaatagaggaactaaagaaagaggaacatgaaatggaagaagaatctgaaaaagaaaataaagaaaaggaaaatgaaatgaaggaaagagaagaaaataaaggggaaggaaaagtgcatatagaaaacccagaggatttagcaaaagtaatagatgtagagcattttgtgaatatgataaagaaaagattaaaaatgttagagaaattagtaaaagaataccatggtcaatatttagatcctacctttttctccttaaaagcacaaatagagaaactctctctaattaatgaaaaattggcccaagaactattaaagaaatgggaagaattatacaaagaatactcttcctataaaaataggccaaaagcgatagaggctaaagccagtttagaaatttcaatggagttaaagcaaatattagacaaacccccagaagaaataaaggaatatgctaaaaccaaaatagaagaggctaggaaaaaaattaaagaaataaaagagaaagtattaaaaagtaaagatgaagcaatgaaggatttagtatctttagctaaagatgttttgttggcaagaacattagagttgcacgctaacataaaaatagaaattacagatgctaatttacaagcagagttagagctaaaagttgtaaacctaatagcaaaaatagaaaaagcccaatctttaggagaaatattgaaattaattagagagtataagcaattaaagaaagcgttcgaagaagctaaagaaaaacaaaagcaaatgttaaaacaattgctaaaagaattagaaaacttaactaatgaaaatgcggaagtaaaaggagaagccgaagtaaatactcaataa

SEQ ID NO: 719 - protein, 390 aa, Nanoarcheum equitans
  signal (1)..(20)
MKKLFWVLAIPLALSAVQLKGELKGDNNKIEGNAEINVTIPIPKKPKIYCIQVYKPVKCELELPNGEKIEKVFGNDCIAKTYASQHNAKIIKCEPMLEKLEDNNEEEIEELKKEEHEMEEESEKENKEKENEMKEREENKGEGKVHIENPEDLAKVIDVEHFVNMIKKRLKMLEKLVKEYHGQYLDPTFFSLKAQIEKLSLINEKLAQELLKKWEELYKEYSSYKNRPKAIEAKASLEISMELKQILDKPPEEIKEYAKTKIEEARKKIKEIKEKVLKSKDEAMKDLVSLAKDVLLARTLELHANIKIEITDANLQAELELKVVNLIAKIEKAQSLGEILKLIREYKQLKKAFEEAKEKQKQMLKQLLKELENLTNENAEVKGEAEVNTQ

SEQ ID NO: 720 - DNA, 687 bp, Nanoarcheum equitans
atgtttgatgattgtgatataatattagaagtaatggatgctaggataccatttccaaacaaaaaaatagaaaaactaaacaaaataataattaaagttttaaacaaagccgatttggttgaagcagaagagttattaagtttatatggtgatgtgtatgtttcctctagaacaagaaaagggctaagagtattaagaaataaaataaaagaggttgcgaaaaatattaataaagacaaaataattgtttgcgttgcaggttttccaaatactgggaaaagctctctaattaatgctttaagaggaagacacgttgccggtacagctcctataccagggaaaactaaaggtatccaattaataaagctatcaaataaaatatatttaaaagacactcctgggatttttactctaaaggataaagagttgttaactttaataggctcttacagcccagagaagcttgacaaccctattagagtggctttaaaactaataaaactaatttttgaggatttgcaagagcggtttaatatagaagcaaaagatgaaaatgaatttttagaaaagttatccaaaaaatggcgcatgccattacgagatacagcagttagattattatcactttgggttaatggaaaaataaaagttaaataccctatcagtatcacctcctctcatcactaa

SEQ ID NO: 721 - protein, 228 aa, Nanoarcheum equitans
MFDDCDIILEVMDARIPFPNKKIEKLNKIIIKVLNKADLVEAEELLSLYGDVYVSSRTRKGLRVLRNKIKEVAKNINKDKIIVCVAGFPNTGKSSLINALRGRHVAGTAPIPGKTKGIQLIKLSNKIYLKDTPGIFTLKDKELLTLIGSYSPEKLDNPIRVALKLIKLIFEDLQERFNIEAKDENEFLEKLSKKWRMPLRDTAVRLLSLWVNGKIKVKYPISITSSHH

SEQ ID NO: 722 - DNA, 588 bp, Nanoarcheum equitans
atgcttagcttaaaattaaaaaaatctttatattttcctggtcggtttcagcctttaaccatatcacattacaatattgccaacaaattatctaacgattacgaagttatatttttaccagtaagagttattttacccaatggtgaaccaataataaataaggattacccatttttgatagaagaacaaaaagaaatgtttgaattactaggacaaaaatacgaattttttctaattgagcctccttatatagatgtactaaaacaaaagaaaaaattcgatttagtatatatggggggaaacaattggattaaaagaaaagtttatggctattttgctaagcaattaatagttaataatagatataatggaccatccgcttcccaagttagggaatgctatttatctaattgcgatttatgggagaaatatgtacccaaaacaattgtgccctatttgagaaatattagagagttagttaaaacgagaattaaaaaacccaatgtgaaaacaataaagatttatgatttttccatacctctttcgctaaaaattttaaggggcatattctctaaaaaagatgtttga

SEQ ID NO: 723 - protein, 195 aa, Nanoarcheum equitans
MLSLKLKKSLYFPGRFQPLTISHYNIANKLSNDYEVIFLPVRVILPNGEPIINKDYPFLIEEQKEMFELLGQKYEFFLIEPPYIDVLKQKKKFDLVYMGGNNWIKRKVYGYFAKQLIVNNRYNGPSASQVRECYLSNCDLWEKYVPKTIVPYLRNIRELVKTRIKKPNVKTIKIYDFSIPLSLKILRGIFSKKDV

SEQ ID NO: 724 - DNA, 882 bp, Nanoarcheum equitans
atggtgctcttcgactggggtacatacaatggaggaagcaagctatatgttgcagagctattgggaatgaaactaacagaaataccaccatacgattttagcaggagaaatagaccaatagagtattttaagcaatacaaagaaaaagcaacaaaagcgtttacaacaataactgcccatgccccctattattcattaatcccaagggatttaaggcaattagataaaatcaaaaaaataatgttagatgtggcaataaaagcgaaaactgctggggctgaaatattaaacatgcatataggaggcaaaactggagacccagacaaagatgttgaaatagtaacaagtgtattaaagtatttgttacaaaataccaaagacattaagttctccttagaaacatcctattctggttatctatttggttctatagaagaaataagggcagtaatagaggcattgaattcggatagagtattaatatcgttacaattagaaaatgattggatgagagaattcgaagtatatagaacagggcaattccataaagctgcacaatatgccacagaggatttctggaaaaagatattgaaacaagggttagaattgggtaacggttatctatccctaaggtttgcccaaataactggagtaaggctaaggggaatagtagttaaaaagagagttccattaggaatgggttacccaccattagagccattggctaatgccatagcagaatttatggtaaaagaagtatatgaaaaaggtttagaaacaaaaatgcatataatatatacaggtataccacaaaccaagtatgttgatacccttaaattatattcctcaataatggaaaaggtagtaaattatttgagatga

SEQ ID NO: 725 - protein, 293 aa, Nanoarcheum equitans
MVLFDWGTYNGGSKLYVAELLGMKLTEIPPYDFSRRNRPIEYFKQYKEKATKAFTTITAHAPYYSLIPRDLRQLDKIKKIMLDVAIKAKTAGAEILNMHIGGKTGDPDKDVEIVTSVLKYLLQNTKDIKFSLETSYSGYLFGSIEEIRAVIEALNSDRVLISLQLENDWMREFEVYRTGQFHKAAQYATEDFWKKILKQGLELGNGYLSLRFAQITGVRLRGIVVKKRVPLGMGYPPLEPLANAIAEFMVKEVYEKGLETKMHIIYTGIPQTKYVDTLKLYSSIMEKVVNYLR

SEQ ID NO: 726 - DNA, 1623 bp, Nanoarcheum equitans
atgattttaagagaataccaaaagaaagctgtttctatagccttagagaaaaagaaatgtgtaattgtattacctacgggcactggtaaaaccattattggagcatattttgttaaaaatttattggataaaggcaaagcaataatagtagttcctactagaattttggttgaacaaacatacaatgtttacaaatctttaggattgaacccaacaaagatttatggtataatcccaaaaagcaaaagggcaaacctatggaaaaaagccaaaattgctattaccactccagaaactgcttattttgataaggaatatatagatcatgacataattgtattagacgaatgccatcacgctattggaaatgactattatgctaagctattaagagagaaagagtttgaatataaattaggattaagcgctttcattcctaaaaagtatagaaaagaaatagaatccctaataggggaaataatagagttgtatgacgaaccctctttaaaaaaatatatccctaattggattggcgatatatatgaagcgcctttgaacaaattagaataccaattatataaagagattgaagaattaaagagaaaatccaaaggtagcaaaaggcttatatatagcttagctttgaagtatttggcaacagatggaggtttggcattaaaagaaagtgtaagcaaaaataatattttatctaaaatattgagcccattcaaagacaaaatagaaaagattagggatttacacaaatgggacgctttaaaaagtatattagatacatacgaattcgaaaaagccattatttttatagatagggttattgttgcaaagagagttgcccaatcattagatgcagccctaataatagggaaaaagcataaaaatatagcgcaatccttgaaagaagcaaaggaaaaaaatataatagttgctacctctgcaggggaggagggattagatttaccaagcgcagatctattaatagtatggtcccaaacatctaatccgataaggtttatacaaaggcatggccgaataatgagaccaacaaagatgttaaaatttgtaacttatatagttactccttatacaatagatgttgatttatttttgtccgcggtattgaaggtatcgaaatacgttgatataaatataaatgtgaaaaactatttcaaaaaaagctctgttcatcaaataataaatctattaacagagccattaactaaagatatgttaaagcaattgggatttactgataacgaaataaatattgctttaaaatatggaatagaaaatggggatatagtatacttttattcccctttcggaaaattatacatcaataaggactttatgtatatggttgagagacgatatccaacaattttcataccaaaatgggagggcaaaataaaaataaataacaaaacaataaagggagattaccaaaagctatatgaaaagctatccaatatgatcccaattaaagggctaaaaataacagtcataaaaaagaaagacataatagaatatgattggagatcctataattatacaattgatagcaaaccattattaaggctagttttaaggaatgctttgtcttaa

SEQ ID NO: 727 - protein, 540 aa, Nanoarcheum equitans
MILREYQKKAVSIALEKKKCVIVLPTGTGKTIIGAYFVKNLLDKGKAIIVVPTRILVEQTYNVYKSLGLNPTKIYGIIPKSKRANLWKKAKIAITTPETAYFDKEYIDHDIIVLDECHHAIGNDYYAKLLREKEFEYKLGLSAFIPKKYRKEIESLIGEIIELYDEPSLKKYIPNWIGDIYEAPLNKLEYQLYKEIEELKRKSKGSKRLIYSLALKYLATDGGLALKESVSKNNILSKILSPFKDKIEKIRDLHKWDALKSILDTYEFEKAIIFIDRVIVAKRVAQSLDAALIIGKKHKNIAQSLKEAKEKNIIVATSAGEEGLDLPSADLLIVWSQTSNPIRFIQRHGRIMRPTKMLKFVTYIVTPYTIDVDLFLSAVLKVSKYVDININVKNYFKKSSVHQIINLLTEPLTKDMLKQLGFTDNEINIALKYGIENGDIVYFYSPFGKLYINKDFMYMVERRYPTIFIPKWEGKIKINNKTIKGDYQKLYEKLSNMIPIKGLKITVIKKKDIIEYDWRSYNYTIDSKPLLRLVLRNALS

SEQ ID NO: 728 - DNA, 546 bp, Nanoarcheum equitans
atgttttttataagcgaggtagaagactatgttagagttgatccaagggatttaaaagaaaaaactatcgaagaagcaattaaaaatgcattattaaagcaatatgaagggaaaataaataaacaattaggttgggttttatctattttagatattttagacaaaagtgaaggatatttaggctataacgatggaggaatatattataaagtaaggtttaaagttttaacctggaaacccatattaaaagaagtaaccttgggaattatatcaaatatagtcgattttggtgcttatgtaaatattgggcctacagatggtttaatacatatatctcaaataatggatgatatcgttgattattctaaagacaaagttttggctggtagaaaaactaaaaagatactaaagatagaagatatagttaaagcaaaaatagttggtataagtataaaacccataggtacaaagattaatctaacgatgagacaagcagggctaggcaaattgcaatggctatatgaagagaaagcacaatctgaatag

SEQ ID NO: 729 - protein, 181 aa, Nanoarcheum equitans
MFFISEVEDYVRVDPRDLKEKTIEEAIKNALLKQYEGKINKQLGWVLSILDILDKSEGYLGYNDGGIYYKVRFKVLTWKPILKEVTLGIISNIVDFGAYVNIGPTDGLIHISQIMDDIVDYSKDKVLAGRKTKKILKIEDIVKAKIVGISIKPIGTKINLTMRQAGLGKLQWLYEEKAQSE

SEQ ID NO: 730 - DNA, 597 bp, Nanoarcheum equitans
atggactgggaagagctggaaaagcaaatactaaattgcaaaaaatgccctttatataaatatgctagaaacaaagttattggggatggcaataaaaatagcgatatagtatttattggagaagcccctggggaagaagaagataagcaaggtaaaccttttgttgggagggcaggccaattattaaataaattgttagaaaaaataggattaacgagggatcaaatttatataactaatgtattaaaatgcaggcccccaaataatagagatcccaaagaagaagaaatagaagcatgtaagccctatttagttatacaattagatttaataaagccaacatatattgttactttagggagattcgccacaaaggaaatatttgatttgtttggcctaaagtttagctctataacaaaagtaaggggtaaaccatattatgttagaagatggaacaaaattgttacgatattccctactctacatccagctgccgctttataccatacaaaatatttgccaattatagagcaagactttgaaaaactaaaagagataattagcaataataaaagagggttgttaaagtttatctaa

SEQ ID NO: 731 - protein, 198 aa, Nanoarcheum equitans
MDWEELEKQILNCKKCPLYKYARNKVIGDGNKNSDIVFIGEAPGEEEDKQGKPFVGRAGQLLNKLLEKIGLTRDQIYITNVLKCRPPNNRDPKEEEIEACKPYLVIQLDLIKPTYIVTLGRFATKEIFDLFGLKFSSITKVRGKPYYVRRWNKIVTIFPTLHPAAALYHTKYLPIIEQDFEKLKEIISNNKRGLLKFI

SEQ ID NO: 732 - DNA, 783 bp, Nanoarcheum equitans
ttgaagttaaacaaagagagggagcaattgttaaaagaaaaaagagctttgaaagaagagattagggtatatgtttcaaaagttagagagttaaaggcgaaaaaacaagcattaactgaagaattaaatagtttaatggaagagaaaaacaaactattggaggaaataaaaaagattagggagcgattaagcgaaataaacgaaaaatatggggaggaattgaaaaaattaccaagtgatgttaatccaaagaaaattaggagggaaattgaaatattggaaagaatattgcaaaccgaagtgttgagctataaacaagaaaaagaaataattgaaagaataagaaaattagagaaaaagttaatggaaattcaagaaaacccaattgcgatggaatttgaagagctaaatagacaattaattgaaaaacaaaaagagctaaatataatcaaggaaagaataagagatgcattaatggagaagaaaaaagttagagaaacaatgcaagagttattaaagaaattagacgaattaagagctaggcttaaagaaattgaagatcaatatactaaggttaaacaagaatacataaaaacagacgaagagatacaaaagaaattagaaatgttggctatgacaatgggcaaaccattgcctatagaggaaatagacttagaagcggttaaatctaaaataaaagaaatagacgaaaagctaatgaggggagaaccaattactacagaggaattattgctattacaacaatttgaatctgttagataa

SEQ ID NO: 733 - protein, 260 aa, Nanoarcheum equitans
MKLNKEREQLLKEKRALKEEIRVYVSKVRELKAKKQALTEELNSLMEEKNKLLEEIKKIRERLSEINEKYGEELKKLPSDVNPKKIRREIEILERILQTEVLSYKQEKEIIERIRKLEKKLMEIQENPIAMEFEELNRQLIEKQKELNIIKERIRDALMEKKKVRETMQELLKKLDELRARLKEIEDQYTKVKQEYIKTDEEIQKKLEMLAMTMGKPLPIEEIDLEAVKSKIKEIDEKLMRGEPITTEELLLLQQFESVR

SEQ ID NO: 734 - DNA, 228 bp, Nanoarcheum equitans
atgccacgcataatacatgacaaaaacaaatgtattggttgtatggcttgccatgcgatttgttccaccttctttgtaccagatgaagatggtaaagtcgctttagtcaaaaatggagtaaaagcattatataaagatggggttgcctctatagaagtggataaacttgattgtgctgaagatgctgctaatgcctgcccaacaggggctataaaggtggaaaagtag

SEQ ID NO: 735 - protein, 75 aa, Nanoarcheum equitans
MPRIIHDKNKCIGCMACHAICSTFFVPDEDGKVALVKNGVKALYKDGVASIEVDKLDCAEDAANACPTGAIKVEK

SEQ ID NO: 736 - DNA, 597 bp, Nanoarcheum equitans
atggcctacaataagaaatatgctgattggaaaagaaagatatggtttactataaaagcgccagccatttttaatgaagtagagttaggcgaaacccctgcatataaaccagaacaagtaattggtagaagagtagaattaaatatggctttagtaacaaataactatcaattgcaaaactataagggaatattcaaaataacaaaagttgagggaactactgcaaaaacagaattagaagggattaaaatgtatgaatctataatacaaaaatgggttgaacccgggagagataaaattaccgactcctttgtaataaaggataaagacaatagattagttagggtaaaacccgtattaataaccaatagaaggttacatagaaagcaaggcaccgctataagaaatatatggagaaactattttgtagagttaggcaaaaagttatcttttgaagatatggttatgaaaatattaaacaaagaaataccagagcaattgaaaatacaaatcaaaaagatataccctccattgttttttgctattaggcaattctatttagagccaagagagaaacatatactattaatagaatga

SEQ ID NO: 737 - protein, 198 aa, Nanoarcheum equitans
MAYNKKYADWKRKIWFTIKAPAIFNEVELGETPAYKPEQVIGRRVELNMALVTNNYQLQNYKGIFKITKVEGTTAKTELEGIKMYESIIQKWVEPGRDKITDSFVIKDKDNRLVRVKPVLITNRRLHRKQGTAIRNIWRNYFVELGKKLSFEDMVMKILNKEIPEQLKIQIKKIYPPLFFAIRQFYLEPREKHILLIE

SEQ ID NO: 738 - DNA, 528 bp, Nanoarcheum equitans
gtgagggcagtaagctgggttttaggtttagtagtagctatagttttatctttaattagcttttttattgtatctttcccattgcaatattctggaaataaaggattgccttatttgttatcgcccgcagagaaaacaatgcaaacatttacactaaacgaatcctattgtaatattctatgtataaaatataaagcgggacaaaatgttgataaaactttattagaaaaatgtgagcaaaaatataacttaggttgttacaaaccaaacataaaacctatagtttttgcgaaacctgtgaaaaacaaagcattatattgtcattgttatgtttatgaacccaatactaaaccttcgtgtactagtttttatgaatctgtcaaatctatattggaaggcaatactattagtgtattaaatgtagaggagagagattgtaatgaagtttgtgtaaactttttaaaaacttattgtgaaacaaattctggtgattgttctatggcaaaccaatgtgtgtatgtaagataa

SEQ ID NO: 739 - protein, 175 aa, Nanoarcheum equitans
  signal (1)..(25)
MRAVSWVLGLVVAIVLSLISFFIVSFPLQYSGNKGLPYLLSPAEKTMQTFTLNESYCNILCIKYKAGQNVDKTLLEKCEQKYNLGCYKPNIKPIVFAKPVKNKALYCHCYVYEPNTKPSCTSFYESVKSILEGNTISVLNVEERDCNEVCVNFLKTYCETNSGDCSMANQCVYVR

SEQ ID NO: 740 - DNA, 321 bp, Nanoarcheum equitans
atggagttttgtccaaaagatggatctatactaattcctaaaaaagagggagataaaacctatttggtttgccctgtttgtgggtataaaaaggaagtaacctctttggttataaaggaagaagttaagaaaaaagaagaattaggtaaaggtattgctgaaaaagaaacaatctattccaaagccaaaggtgttaaatgtccaaaatgcagtagcgaagaagttgtttactttacattgcaaaccagggcaagcgatgaagcagaaactatattttacaaatgtttaaaatgtggttacacttggagagagtatgaataa

SEQ ID NO: 741 - protein, 106 aa, Nanoarcheum equitans
MEFCPKDGSILIPKKEGDKTYLVCPVCGYKKEVTSLVIKEEVKKKEELGKGIAEKETIYSKAKGVKCPKCSSEEVVYFTLQTRASDEAETIFYKCLKCGYTWREYE

SEQ ID NO: 742 - DNA, 648 bp, Nanoarcheum equitans
atgaaaatcaaatacatgggacacagcgcttttattatagagcataagaacaggctaataatagatccatacatagaaacaatacctgaagtagattatgtattggtaacgcatgctcataatgaccattttggtaatactatagagattgccaagaaaaacaatgccaaagttatttctatatatgaaatagcagaattcgttaagcaatttaatatagaaagcataggcatgaactttggaggcactatagatattggagaaaaggttagtttagtgcctgcagtgcacagctctactttatattacaatggaaaagcttatcccttgggaaatcctggagggtttgtaattaagggaaataaaaccatataccatgctggagatacaatggttttcaaagatatggaactaattggagagctatttaaaatagatgttgctttgttacctattgggggggtatttacaatggatattgaccaagctctaaaggcaatagatttgcttaaaccaaaaatagttataccaatgcattataatacatggccaataattaaagccgatccatacgaatttaaaagaaaagccgaagaaaagggagtagaagcgattgtattaaataaagatgaagagatagatttataa

SEQ ID NO: 743 - protein, 215 aa, Nanoarcheum equitans
MKIKYMGHSAFIIEHKNRLIIDPYIETIPEVDYVLVTHAHNDHFGNTIEIAKKNNAKVISIYEIAEFVKQFNIESIGMNFGGTIDIGEKVSLVPAVHSSTLYYNGKAYPLGNPGGFVIKGNKTIYHAGDTMVFKDMELIGELFKIDVALLPIGGVFTMDIDQALKAIDLLKPKIVIPMHYNTWPIIKADPYEFKRKAEEKGVEAIVLNKDEEIDL

SEQ ID NO: 744 - DNA, 444 bp, Nanoarcheum equitans
atggatgtttctacccaaaggaggatggctgctgaaatactaaaggttggacttgatagggtatggatagaccccaaccatttaaaagaagtagcagaggcattaactaaagatgatattagagagttaataaagagagggataataaaaaaacttccaatagagggccaatctagaaaaagagctagagaattgcatgaaaaaaagaaaaaaggtagaagaaggggaccaggttctaggaaaggtaaaagaactgctagagcagatccaaagagacaatggattaataaagttagggctcaaagaaagctattaaaagagctaaaggaaaaaaagattattgataacaaaacatattgggatttgtataagaaagttaagggtaatctattcaaatcgagatcccatctattgttataccttaagcaaaaaggtatcatgtga

SEQ ID NO: 745 - protein, 147 aa, Nanoarcheum equitans
MDVSTQRRMAAEILKVGLDRVWIDPNHLKEVAEALTKDDIRELIKRGIIKKLPIEGQSRKRARELHEKKKKGRRRGPGSRKGKRTARADPKRQWINKVRAQRKLLKELKEKKIIDNKTYWDLYKKVKGNLFKSRSHLLLYLKQKGIM

SEQ ID NO: 746 - DNA, 1518 bp, Nanoarcheum equitans
gtgaacctaattttattagctgaaatattattttctttaacctctatattttttgctgcccttattttaaaacctttccttgtatttaatatatttgctacactttttggcaaacaattcgcttgtaaaagctttgctaatttaaatagctttttagccccaattgttatattgccaatcccagatgtttgctacaattctgctatttacaatttagataatatgaaagttggttgctttttgttaaaaaaagatttatctgatatatacaattattaccaaaaattgtatggacaatgctctaataataatgaatggcaaaaactttatttttcttacataattgcgagaaatattgaggattgctataataaatattatggtttacatgtagaagacaaagcccatactaatgtgtttccttgtagtaatttgtttatttatagcaagaatcctatagaaataactccaacagatgtcgttataatactcaacaaactaaaaaaattagaaatcaattattttgatttagattcaaagcaaacaattaaactatacttcaatccaaagatagaaattaagggagatgtggtaataaaaactgataatgaaagtataatttacaaaagccattatattaatggaaaaaaacctttatatttggtttttgattctaaggattttaatactaaagaaagaacctttttcataaaatccaattcttatgttctaataaattattatgacaatgagcaacaaatttccttagttgaaaaggttgcagctgcaaaaaaggtggaaagctttttttctaaaatagaccaaattttgggatggtttgtattattagctatagcatttataatagtgttagttatattaagtgttccaataggggtattgtctgcattggttagttcagccccgacaattttaaatataattttaaatttaagtaaaaaaattggaaaaataatagcctttataaaaatagcgattgtgatagccgcttttctatcgccaaacatagcaaaacttctattaggaattgatgatagttataaagaattgtttaaatctcaaacaggactagttagcaaaattaataaacctgtgataggagtaacaacccttattcctaaaaaagacgataccaaatggtttttgtattcggtattgcataaatctatacaaaacctatttgaaaaaaaagacataattttatcgaaatataatattagtgtttgcaaaataaataattatagtacaatatatcaaggtagagatataaaaatatattgcaacaatggttgttcattcgaaagcaaaaccggtaaaccaattaatgccaaactatttataatagatgaagctccaaccagtgaaaaagaatacggattgtatctttctagggggaatatagcgattttattagatccatcttacccaataggagagaaagacgtagaaaccatcgctctagaacttataaagggctttaaagcaatatattgttaa

SEQ ID NO: 747 - protein, 505 aa, Nanoarcheum equitans
  signal (1)..(46)
MNLILLAEILFSLTSIFFAALILKPFLVFNIFATLFGKQFACKSFANLNSFLAPIVILPIPDVCYNSAIYNLDNMKVGCFLLKKDLSDIYNYYQKLYGQCSNNNEWQKLYFSYIIARNIEDCYNKYYGLHVEDKAHTNVFPCSNLFIYSKNPIEITPTDVVIILNKLKKLEINYFDLDSKQTIKLYFNPKIEIKGDVVIKTDNESIIYKSHYINGKKPLYLVFDSKDFNTKERTFFIKSNSYVLINYYDNEQQISLVEKVAAAKKVESFFSKIDQILGWFVLLAIAFIIVLVILSVPIGVLSALVSSAPTILNIILNLSKKIGKIIAFIKIAIVIAAFLSPNIAKLLLGIDDSYKELFKSQTGLVSKINKPVIGVTTLIPKKDDTKWFLYSVLHKSIQNLFEKKDIILSKYNISVCKINNYSTIYQGRDIKIYCNNGCSFESKTGKPINAKLFIIDEAPTSEKEYGLYLSRGNIAILLDPSYPIGEKDVETIALELIKGFKAIYC

SEQ ID NO: 748 - DNA, 738 bp, Nanoarcheum equitans
atgaaacttataggtacaggttggaaaagtccttctttaatagatgtgcacaataaagttacttttactctatggctttgtgggtgtaatttgaaatgccctttttgtcataactggaaaatagccgaaaaaatagggtgtggagaattagatataaatagattgttagacgaattagatagtgcttctttattaatagattatttacatgttactgggggagaacccttattgcaatgggaaccattattggaattgttcaaaacctcttacgaaaattataatgtggaaaacagtttgaatactaattttacattaactatcccattaaagaagcatttggattcgggttatgttcaccatgttgctaccgatctaaaagtgcccccaaatgaaatgtatggggtagaaaattggaaagccttatgggaatcctatttgaaaagcctttctctaatgaaagaatatgatatccccttagaattaagaattcctgtttcgagattcccatgggaagaaaagaaaccatacatagaccaagcacttaaagctttaggagacgcaaacttctatgtaataataaacccattattgaattacccagttgtaaatcctagaaacaaagaatggtgtgacaagcattgttctcctcaaaaagaagaattaaatataataaaagactatttagagagccaaggaataaaagtttatctaaaagggcacagcgaattaatatag

SEQ ID NO: 749 - protein, 245 aa, Nanoarcheum equitans
MKLIGTGWKSPSLIDVHNKVTFTLWLCGCNLKCPFCHNWKIAEKIGCGELDINRLLDELDSASLLIDYLHVTGGEPLLQWEPLLELFKTSYENYNVENSLNTNFTLTIPLKKHLDSGYVHHVATDLKVPPNEMYGVENWKALWESYLKSLSLMKEYDIPLELRIPVSRFPWEEKKPYIDQALKALGDANFYVIINPLLNYPVVNPRNKEWCDKHCSPQKEELNIIKDYLESQGIKVYLKGHSELI

SEQ ID NO: 750 - DNA, 1086 bp, Nanoarcheum equitans
atgatagctttcattagcgatttgcatttgggcaatatttacgctaataaaaaagagactgaagagcatagctataatgctttggcaaaaatcgaagaaaagctattagaataccaaccagatttagttttggttggaggggatatattcgataaaaacaaagtctctggaaaagagattggggtattcatagattttattaataaaatgaataaaaacaacatcggagtagtaagtattagcggtaaccacgatggcaaatattggttaaaagaatcattcgatcacgctattccctatattttatacaaaagcggaattaacccagagaatggttatgaatattactcttttgctggaatttatttaaaaaattcgagggattggaaaaccctttcaatgatagaggataaatatgatatctctatagtagggttttctttttataccaaagaccgtttaccagaattgtatgagtatttgtctataattgatagggaaaaaagcgattatattttactaatgcaccaatctctcaaaagtttattaccccaagatccagcagcgatagatttaaccattgagaattacaaatacgctttatttgggcatatgcatatgaagtactataaggataaaataatagtaacacccccaccatattctatttcgttaaaagaggccaatactgaaaaaggcttttggttaatagataaaaaacccgtttttgttcctatagaggatagtaggccttttattaaaatggctattgatttagataacccaatagagataaagccaaacaaaaatgccattttaattttagatgtctattatagagaatctcaaatagacaaactaaatctattgaagaaaaccttatcggaaaactttttgtatgttaaaataaacccaatattgaaagagactagcaaaattattgttaaaaagagtgaaaacaaggaagaaatatttaagaaatatctaaaagaagattatgatttctttatggaattatatgaaaaatttagagacataaaagatccagaaactattgttcaatacctcgaatttttctatcgatga

SEQ ID NO: 751 - protein, 361 aa, Nanoarcheum equitans
MIAFISDLHLGNIYANKKETEEHSYNALAKIEEKLLEYQPDLVLVGGDIFDKNKVSGKEIGVFIDFINKMNKNNIGVVSISGNHDGKYWLKESFDHAIPYILYKSGINPENGYEYYSFAGIYLKNSRDWKTLSMIEDKYDISIVGFSFYTKDRLPELYEYLSIIDREKSDYILLMHQSLKSLLPQDPAAIDLTIENYKYALFGHMHMKYYKDKIIVTPPPYSISLKEANTEKGFWLIDKKPVFVPIEDSRPFIKMAIDLDNPIEIKPNKNAILILDVYYRESQIDKLNLLKKTLSENFLYVKINPILKETSKIIVKKSENKEEIFKKYLKEDYDFFMELYEKFRDIKDPETIVQYLEFFYR

SEQ ID NO: 752 - DNA, 984 bp, Nanoarcheum equitans
gtgttatatgttgatgaaaaaataaaagaaatgtatgaaaaagcgggttatagagtttacaaaactggagcagtagaaatatgccattggactaaagaagctttgaaaaacaaaagattttgctacaaaaacaaattctatggaatagacacacatagatgtatgcaaatatctttagcagcattttggtgtactaatagatgtatctattgttggaggccaaatcacgaatttcaaaaagggcatatagatttgcttaatgaagattggcccgatccaaaagatttgttagaaaatctaagaaagctaagagcagagctattaataggttttaaaggtaatgaaaaagtggataaaaaaatgttagaagaagcgttgttgccaaaccatgttacattttcattaattggagaaccattattatatggtaggatggacgaagctatattgtatctaaaaaagagctggcactggcttaagagtatatttatagttacaaatggggtagtttatgaaactatagaaaaattaatagaaaaaaatgcattgcctactcaattctatatatcttttactgctccaaatgaagaattgtttttccaagtatctaaaccattgttaaatgatgcatggaagaggttcaataaaagcttaaaactaatgaggcacgctaaaacaagaaaagtagcgaggataacattaattaaaggtataaatgatacagattttgagggttgggcctctttaatagaaaagtataatccccattttgttgaagtaaaagcgtttatgttattgggttattcgagacaaagactaacaataaaaaacatgcctacacatgaagaagtaaaagaattcgctaaaaaattaagcgaatatatagattacgatttggttgatgaacatgtagattcgagagtagttttgttacaatctaataaaaatgtcatcgatagaaaaattcgaggtattgaacaatag

SEQ ID NO: 753 - protein, 327 aa, Nanoarcheum equitans
VLYVDEKIKEMYEKAGYRVYKTGAVEICHWTKEALKNKRFCYKNKFYGIDTHRCMQISLAAFWCTNRCIYCWRPNHEFQKGHIDLLNEDWPDPKDLLENLRKLRAELLIGFKGNEKVDKKMLEEALLPNHVTFSLIGEPLLYGRMDEAILYLKKSWHWLKSIFIVTNGVVYETIEKLIEKNALPTQFYISFTAPNEELFFQVSKPLLNDAWKRFNKSLKLMRHAKTRKVARITLIKGINDTDFEGWASLIEKYNPHFVEVKAFMLLGYSRQRLTIKNMPTHEEVKEFAKKLSEYIDYDLVDEHVDSRVVLLQSNKNVIDRKIRGIEQ

SEQ ID NO: 754 - DNA, 699 bp, Nanoarcheum equitans
atgcgcgtaatagtattcttcgtagagcctgagaaagttgataacataggagcaatggcaagggtttgcaaaaactttaatgcagatttatatttaattaacccaaaagtagataactacgaaaaagcctttgttgtagcaaagcatgcccaagatttattgcaaaaagcgatagagaataagctaaatagtatagatgaagcaaaagaattagttgatataagtgtgggcactacaggaaaaatagctaacgaatacaatgtattaagaagccctttaaaaccatgggaattagcagagaggtttgccaatagcgatataaaacttggtatatttattggaagagaaagcataggtttaactaatgaagagctatcaaaaatggattttattgttactattcctgcgaataaagaatatccaatactaaatgctacccatgctacagcaataattttatatgaattattcaaacattcaaaagaagggcatgttaatttagctttaccaaaaaaagaacaaatcgatgttttattagattatgtgaagaaaataattgataaactgcctcaaccagattatagaaaggaatattattttataataatgagaaaacttattacgcaaggcataataaatagcagggaagccaatacattaattgggttttttagatctatatatgaaaatctcaaatga

SEQ ID NO: 755 - protein, 232 aa, Nanoarcheum equitans
MRVIVFFVEPEKVDNIGAMARVCKNFNADLYLINPKVDNYEKAFVVAKHAQDLLQKAIENKLNSIDEAKELVDISVGTTGKIANEYNVLRSPLKPWELAERFANSDIKLGIFIGRESIGLTNEELSKMDFIVTIPANKEYPILNATHATAIILYELFKHSKEGHVNLALPKKEQIDVLLDYVKKIIDKLPQPDYRKEYYFIIMRKLITQGIINSREANTLIGFFRSIYENLK

SEQ ID NO: 756 - DNA, 357 bp, Nanoarcheum equitans
atgaaagcagcagtagcgtgttacgaaagcaatggtgtgtataagctattcccaacagagtttggccatgcccccatatttgtaatagtagacctcgatacaaaacaaatagtagaaaaaagggaaaacccctataagggagaagaatccaaagataaattcaaaaaattagccgaatatttgaaagatgtggattattttgtaggcaaacaatttggtacatctgttttgaaattaaggccaatgtttaacaaaatccccgtagtagttaatgccgaaaccttagaagaagcaatagaaaaactatctaattcgaaagataagctaaatttagacagctatgttattttgttgtag

SEQ ID NO: 757 - protein, 118 aa, Nanoarcheum equitans
MKAAVACYESNGVYKLFPTEFGHAPIFVIVDLDTKQIVEKRENPYKGEESKDKFKKLAEYLKDVDYFVGKQFGTSVLKLRPMFNKIPVVVNAETLEEAIEKLSNSKDKLNLDSYVILL

SEQ ID NO: 758 - DNA, 366 bp, Nanoarcheum equitans
atggatctaagagaaaagtatttgctctttgaagagcttacaaaggaatatgaagtaatactaaatagagtagcggaattggaattagctatagaatatttaaaagagctaagagatgggaatggcttaatattatttaatggtttgctaatcaaaggggaagcaaaagaaacgaacaaagttattgtcccagttggagctaagtattatgtagaaatagacaaagacaaagccatagaaaagatggcaaaacaattggattctttgaaaatagaggctgaaaaacttaaaaatgatattgataaaataaaagacgaattaaaagaggaattggccaaactacaacaaaataacatagctgtctaa

SEQ ID NO: 759 - protein, 121 aa, Nanoarcheum equitans
MDLREKYLLFEELTKEYEVILNRVAELELAIEYLKELRDGNGLILFNGLLIKGEAKETNKVIVPVGAKYYVEIDKDKAIEKMAKQLDSLKIEAEKLKNDIDKIKDELKEELAKLQQNNIAV

SEQ ID NO: 760 - DNA, 2004 bp, Nanoarcheum equitans
ttgccaacaggtttagggaaaacagtaatagcgttaatgctaatagagtatttcaaacaaaaatacccggataaaaagatattgtttttagctcctacaaaacctttggttaatcaacatgtggaatttttaagaaaatatagcgatatagatccaacaaaaatagttggtataagtggggacataccaaaagaaaaaagggtaaaactttataatgccgatgttatagttgcaactccccaaaccataaaaaatgatttggccaataacttaatagatttgaacaaattctctttaattatatttgatgaagcgcatagggctgtgggtaactattcttacacatatatagctcgcaatttcaataatagaattgtaggcctaaccgcttcccctgggagcgatgaagagaaaataaaagaaataatagaaaacttaaaaatagagagaatagaatatagaaacgaagattcctcagatgttagaccttatgtaaagaaaaaggttataaaatatatcggggtagcattagacaaagaaatacttacagcttcttctcttatacaagaggcgatagagataaggaagaaaaaattggaagagcttggcatattaaagagaaaaataaaggatattgctttattaatggaagagctaaagaagaaacaagcttatagcttagatgaaagggtaaaagatgctataattattggttctgaaattttaattttattccatgctttgaaaacattgcaaacccaaacatatagagcatttcttaaattttgtgaaaacctcttcgaaaatgcccagaaattaagtgaaaaaaatgttgccgaagatgtaaggctaaaaaaagcatatttgtatgttaaagatttagttaaacaaggcaaagaacatccaaaaattaatgctttgttagagataataaaaaagaataaagacaaaaaaattatagtttttgcccagcttacagatacggtaatgcagataactgaattattgaacaaaaataacataaaagctgtagcgtttactggtaaaaagcttatgactcaaaaaaagcaaatagagactttagacaaatttagggctaatatatataatgttttggttgcttcttctgttgcagaagaagggttagatataccgaaggtggatttagtaatattttatgaacctattccctctgcaattagggccatacaaagaaaaggtagaaccggcaggttaaactacggtgaagtaataatattgtattctaaaaatactttagatgaaaaagctctttgggcctctattagaaaagaaaaaaagatgtatgaaatattggaaaaactttctaaagaggttaaaccaaaaaaagagcaaactttaaacgaagtattgggatttagatataaaattattgctgaccaaagagaacaaaattctttagtagtagatgcgttaaaaaaattaggtataggggttaaaattgagaatttagaggttggcgattatatagttggcgatgtagtaatagaaagaaaaactattagggatttcgttgattctataatagataataggatatgggatcaaatgaataaattatcgcaattagataaaaaacttttaatattggaaggagaagaagacccatattttattagagatgttaaccccaatgttataaggagtgttatattaactttatccttaaaagggataccaataataagaactaaaaaccctattgatacagcttattacattaaagttttgtctgaaaaacaaaataaactgccacaaatacctaaaataaagaaaaaagaactaactcctaaagaggttttagcttcttttcctggtattggtgaaaagagtgccgaagagctattaaaaagatacaaaactataaaaaatgttgttaatgcttctttatcgggtttatctattattttgggggaaaagcgtgctaagaagcttaaagaatttttagagaaagaatatcagtag

SEQ ID NO: 761 - protein, 667 aa, Nanoarcheum equitans
MPTGLGKTVIALMLIEYFKQKYPDKKILFLAPTKPLVNQHVEFLRKYSDIDPTKIVGISGDIPKEKRVKLYNADVIVATPQTIKNDLANNLIDLNKFSLIIFDEAHRAVGNYSYTYIARNFNNRIVGLTASPGSDEEKIKEIIENLKIERIEYRNEDSSDVRPYVKKKVIKYIGVALDKEILTASSLIQEAIEIRKKKLEELGILKRKIKDIALLMEELKKKQAYSLDERVKDAIIIGSEILILFHALKTLQTQTYRAFLKFCENLFENAQKLSEKNVAEDVRLKKAYLYVKDLVKQGKEHPKINALLEIIKKNKDKKIIVFAQLTDTVMQITELLNKNNIKAVAFTGKKLMTQKKQIETLDKFRANIYNVLVASSVAEEGLDIPKVDLVIFYEPIPSAIRAIQRKGRTGRLNYGEVIILYSKNTLDEKALWASIRKEKKMYEILEKLSKEVKPKKEQTLNEVLGFRYKIIADQREQNSLVVDALKKLGIGVKIENLEVGDYIVGDVVIERKTIRDFVDSIIDNRIWDQMNKLSQLDKKLLILEGEEDPYFIRDVNPNVIRSVILTLSLKGIPIIRTKNPIDTAYYIKVLSEKQNKLPQIPKIKKKELTPKEVLASFPGIGEKSAEELLKRYKTIKNVVNASLSGLSIILGEKRAKKLKEFLEKEYQ

SEQ ID NO: 762 - DNA, 696 bp, Nanoarcheum equitans
atggttaatatagaggaatggcaacctaaaaccaagttaggcaggttagtcaaagagggtaaaataacaaatatagatgagatattatctaataaatatgttattagagaaccagagatagttgatgtattgttaccaaatttagaggttgaatttatgaaatggcgtataataagaggtaagtttaggtctaaaaaaccatatagaatggcacaaaagaaaactgctgaaggtaataaaacgagatacgaagttattgccatagtaggagacaaagatggccatgttggagttggattaggaagaagctccgatttattgatagctagagaaaaagctattaatagagctaaactaaatataataaaagttgcgagaggttgtggttcttgggaatgtgcttgtggggctccccattctattccataccaagttgagggcaaatccggaagtgttagagttatattaaaaccagctccaaagggagtaggaatagttgcagacgatgagataaagaaaatatttagattggccggaataaaagatgtttgggttagatctttcggtaagaccaaaactaaaatgaaccatgtatttgcagtattcgatgctttgaagaagctatcgaatgtaagagtacaaccattctttataaagttctctggctatacagaaggctctataataaacaaatga

SEQ ID NO: 763 - protein, 231 aa, Nanoarcheum equitans
MVNIEEWQPKTKLGRLVKEGKITNIDEILSNKYVIREPEIVDVLLPNLEVEFMKWRIIRGKFRSKKPYRMAQKKTAEGNKTRYEVIAIVGDKDGHVGVGLGRSSDLLIAREKAINRAKLNIIKVARGCGSWECACGAPHSIPYQVEGKSGSVRVILKPAPKGVGIVADDEIKKIFRLAGIKDVWVRSFGKTKTKMNHVFAVFDALKKLSNVRVQPFFIKFSGYTEGSIINK

SEQ ID NO: 764 - DNA, 1131 bp, Nanoarcheum equitans
atggatatagaagaaagaataaacctcatcgcacaaaagcccacagaagaaattcttactatcgataggttaaagcaatatttagaacaaggaatagatttaaaccattacattggttttgaaatctctggttttgtgcatttaggcacaggaataatttctatgctaaaagttagagattttcaaaaagccaaagttaaaactactttatttttagcggattaccattcatggattaataaaaagttaggcggggatttagaaacaataagaaaagtcgcgaaaggttatttcgctgaagcattaaaggtttcgcttaaaactgtaggaggagacccagacgaagtaaaagtagtcttaggctctgaattgtatgagaaattgggtatagaatatctagaaaacataataaaaatctctatgaacacaacattaaatagaattaaaaagggcataactattatgggaagaaagcaaggagaatcaataagtttcgcccaattattatatgtgcctatgcaagttgcagatatatatagcttaaatgttaatttagcccatgggggaatagaccaaaggaaggcccatgttatagccatagaggtttcagatgcttttggttataagcccatagctgtacaccatcatttattattaggaatgcatatagatgagaatattagacaaaaactattagaggctaagaaaacaaacaatagggaattatttgaggacagtgttatagatatcaaaatgtctaaatctaaacccgagactgcaatatttattcatgatactcccgaagatataaggagaaaaattagaaaggcttattgccccataggggaaatagagctaaacccaataatagaattggtcgaatatgttatatatccaatattaaaagagcccatagtaatagaaaacaaaaaaacccatcaaacaatggaatttgataatgtcgaacaattaaaagaagcgtatgctaaaaagcaaatacatccattagatttaaaagagtatgtagcagaaaagctaatagaaatattagagcctgctagaaaatatttcttagaaggaaaaggtaacaaatatttagaagaattgaaaaacttgcaaatcactagataa

SEQ ID NO: 765 - protein, 376 aa, Nanoarcheum equitans
MDIEERINLIAQKPTEEILTIDRLKQYLEQGIDLNHYIGFEISGFVHLGTGIISMLKVRDFQKAKVKTTLFLADYHSWINKKLGGDLETIRKVAKGYFAEALKVSLKTVGGDPDEVKVVLGSELYEKLGIEYLENIIKISMNTTLNRIKKGITIMGRKQGESISFAQLLYVPMQVADIYSLNVNLAHGGIDQRKAHVIAIEVSDAFGYKPIAVHHHLLLGMHIDENIRQKLLEAKKTNNRELFEDSVIDIKMSKSKPETAIFIHDTPEDIRRKIRKAYCPIGEIELNPIIELVEYVIYPILKEPIVIENKKTHQTMEFDNVEQLKEAYAKKQIHPLDLKEYVAEKLIEILEPARKYFLEGKGNKYLEELKNLQITR

SEQ ID NO: 766 - DNA, 483 bp, Nanoarcheum equitans
atgaaattctcactaaaggttttagttatattcctttatagtgcttttttaataacatttctcgatttgtatgttaactatctaaagggagaaacatttagatatatattttttgatttggttggttatcatatatttccatatttgtttgttttgatagcgccttggttacctttaattattttctacccggaaaaactaaatatatggattgccggaataatagcgagctctttgattaacgatttggtatggtgtatattttattcaatagacaattgcttatatagagaatttctttcaaacgatatatggatggttttagatatagggataaaaatcaaaataccggggatagcgatgctattttttagtatagcgagagttttgctaataatttatttaactagagagtatctttttaattttttcaggcaaatagtcaatataaagtttcccattaacaaacgcataagggtatag

SEQ ID NO: 767 - protein, 160 aa, Nanoarcheum equitans
MKFSLKVLVIFLYSAFLITFLDLYVNYLKGETFRYIFFDLVGYHIFPYLFVLIAPWLPLIIFYPEKLNIWIAGIIASSLINDLVWCIFYSIDNCLYREFLSNDIWMVLDIGIKIKIPGIAMLFFSIARVLLIIYLTREYLFNFFRQIVNIKFPINKRIRV

SEQ ID NO: 768 - DNA, 3039 bp, Nanoarcheum equitans
gtgcgccattactttttggcctcactattaatatttactcctatagcagtatctcaattatctatagacatagaaaccaatacatataaatatactggtttatacaatgtcaatcctggtaagccaaatattaatataccgattaattttgttagcccaaatttaatgaaaagcgctttaaatagtaatccaagggttaatctaaattatcctttgcccccaaagcctaatgaaatagaaaaaagatatagttcattaattggaacaaacccatggataaacatagtatgtaatctaaatattaagcccaaaattaattttaacacaaatataggtttaaaaccaatagtttatgtaacaggcactcccaatgatgtaaaccctaatgaaaaatacaaaataaaatggccatacattagggtaaaccttattttagatagcaacatatttgggaataggtattataaaactttttccaaagaggaaaggggcaaaacaatattagaagcgaaaggcgaagaaatacagaaatcgataatagagaataaacctttagaggggaaaccgatcaatgttggtttttccaatgtaaatgtaaacgcccaaataaataaaagaatagagttcaattatagaataggcaatatattctttaattttccatttctttgtggggtatgtattcctcggtttgaaataccattaaataggataatagagagcatagcaagaagtgcttgttctattatatccaattttggtaataatttattgtctatctcttttaacaatccaataaatgttaatcaaaaaatgtctataactgttccatcgtatgtttttaataataggttcgattctcaaatagaactacccccattggagtatgaagccaaaattaaaataaaagcgagcagattttgtttagattatgtaacaacgatggcaccattaataataatattgctattgctatctaatttgcttagcaaagcgcagaacgatttaaaacaactaaaatcacatctttctaatataaaaagccgtatgaaggaattttacgatataataaacaatgtagggaaaattaaaactatagttactcccaaatatgatagtaattatggttgggcttccaatgataacaatacagacttaaattgtaactgtaacttaaaagaatgctattctaatataaacaatgtatatgctggcgatgaagaatatgcaggttatgaatatgatttatataattatgtagaaaacaaaaaaaggtgggttcaaagcttaaacaccaaagtaagtagttgtaataaagatattgccgggtattttgggtttgggtctaactaccaatatataattagcaatagtaataaattcttaagaactaagggaaaaactggaaaaggtaacgtatattttaactcaatttggataatatctaaacacaaacaagtaacttatgttgatacaagcgattataggtttttatttgtttacaaatgcgctaacaatatagtaaacgatataagagataaagcaaatcccttaattttaatatcatttattgcgaaaaaaatagataaagagataaacgaattcaataacaaaaacttgtggttaaacaaagttttatattattcttatttggttagctcgaaagagaaaaacttgttattggactatgtcaaagaagccgcaaaccttacttatcaatatgtaaaatctgtgtataaacaatatgcccaagaattacaatataacaatagcacagagctaagggagaaagcggaagagctttataatgaaatggccatattgtatgatttctaccaacatccttcattagatagcaagctaattagagttgctgatttaatagtaaaatattgggataacacatctataacgcgattatcctgttctaagctattcaactttttgataaactattataaaaataggttcgattataataaattatcgcaatgtaaaaagaacttattatatttataccaattgtcattagaagtaaaaaatggctatgccaaagtggttggagaaaacaaagaccaaatagagagagtattaaaaaatttcgcaaacatagatgtaagcaaattagacggtttattgtatctatgtgatttgggcaattctaatatggaaaaacaaatagatcaaataaatgcgatgttaggcaaatctaaaaaagaagtagattctttgatagccaatattagagatggtaaaatgccttcgctaatagatattgcatacatgttagcaaacatattagccgtattatatatagtaaattccctgttaatgatattagctaaaatagttttccccatattagagtgtgccattggtgtattaataccaggagcagcagcaataccatttgttggagcgggagcagttagtgcgttgcttttgttaaaagattcaataggtttcattaatgggttaataggaaatatacaaaaactattagaaaaaataacaaatgttgtttccgatacttataaaatgttatatgatgcgatattcaaaataaaaggccatgctaaaaatattgataattgttgtgtaagttgctgggacaaacttccaaaagaggccaaaatagaaataactaaaagctgtatagagaaagctaaactatgtgattatgattcggtaaagtgtgctttgaaacatttagatgggcaatctaaattagccatactaaaagcttatggagattactgcttaagagcgaggttatatgttaatagccccgaagattttagaagggttgccaaattagttggagacaaacaattaaatgaagtagaggaagcttatgccgtatatcaattgcagcaatatatagagaaagcctcgatagaagaattaaagaaagttggggtaaagtatttattgtataaccaatatttagagaaaaagctatacccttatgcgtttgttaatgggaaactttatattgactatttgcctgaaaaaattaaaaagatactctctagttaa

SEQ ID NO: 769 - protein, 1012 aa, Nanoarcheum equitans
  signal (1)..(18)
MRHYFLASLLIFTPIAVSQLSIDIETNTYKYTGLYNVNPGKPNINIPINFVSPNLMKSALNSNPRVNLNYPLPPKPNEIEKRYSSLIGTNPWINIVCNLNIKPKINFNTNIGLKPIVYVTGTPNDVNPNEKYKIKWPYIRVNLILDSNIFGNRYYKTFSKEERGKTILEAKGEEIQKSIIENKPLEGKPINVGFSNVNVNAQINKRIEFNYRIGNIFFNFPFLCGVCIPRFEIPLNRIIESIARSACSIISNFGNNLLSISFNNPINVNQKMSITVPSYVFNNRFDSQIELPPLEYEAKIKIKASRFCLDYVTTMAPLIIILLLLSNLLSKAQNDLKQLKSHLSNIKSRMKEFYDIINNVGKIKTIVTPKYDSNYGWASNDNNTDLNCNCNLKECYSNINNVYAGDEEYAGYEYDLYNYVENKKRWVQSLNTKVSSCNKDIAGYFGFGSNYQYIISNSNKFLRTKGKTGKGNVYFNSIWIISKHKQVTYVDTSDYRFLFVYKCANNIVNDIRDKANPLILISFIAKKIDKEINEFNNKNLWLNKVLYYSYLVSSKEKNLLLDYVKEAANLTYQYVKSVYKQYAQELQYNNSTELREKAEELYNEMAILYDFYQHPSLDSKLIRVADLIVKYWDNTSITRLSCSKLFNFLINYYKNRFDYNKLSQCKKNLLYLYQLSLEVKNGYAKVVGENKDQIERVLKNFANIDVSKLDGLLYLCDLGNSNMEKQIDQINAMLGKSKKEVDSLIANIRDGKMPSLIDIAYMLANILAVLYIVNSLLMILAKIVFPILECAIGVLIPGAAAIPFVGAGAVSALLLLKDSIGFINGLIGNIQKLLEKITNVVSDTYKMLYDAIFKIKGHAKNIDNCCVSCWDKLPKEAKIEITKSCIEKAKLCDYDSVKCALKHLDGQSKLAILKAYGDYCLRARLYVNSPEDFRRVAKLVGDKQLNEVEEAYAVYQLQQYIEKASIEELKKVGVKYLLYNQYLEKKLYPYAFVNGKLYIDYLPEKIKKILSS

SEQ ID NO: 770 - DNA, 444 bp, Nanoarcheum equitans
atgcgagaaatggaagttattgttaaaaaggttggagaattaaaggttggcaattatatatacaacgaacaagatggagaagtatataaaatagtttctatagaaacatccaaaccaggaaagcatgggtctgcaaaagcaagaatagaggcaattagcgttacaagcggtaagaaaatagtaataattaaaccaacaagcgaccctattaaagtgccccaaatcaaaaaaattaaaggccaaataatagcaacagaaaaaaggaaagtaccttctccacaaggagaagtagaagaagtagtagcacaagtaatggatttggaaacatacgaagttatagaagctaaagtaccagaggaattaaaagacaaagtagaacctggggccaatgttatagtgtgggatttaggtgtacctgttgttatgcaagtgtttaaacaataa

SEQ ID NO: 771 - protein, 147 aa, Nanoarcheum equitans
MREMEVIVKKVGELKVGNYIYNEQDGEVYKIVSIETSKPGKHGSAKARIEAISVTSGKKIVIIKPTSDPIKVPQIKKIKGQIIATEKRKVPSPQGEVEEVVAQVMDLETYEVIEAKVPEELKDKVEPGANVIVWDLGVPVVMQVFKQ

SEQ ID NO: 772 - DNA, 987 bp, Nanoarcheum equitans
gtgaaagctatcctaaaagatgttacttctttagtttctaattttaatagcaaaataatacaaaaatcattgaaagaagggaaaagggcttatattatagttttacccaagtttgcaggccttttaaaatatgaaataggtaaaaggagggttgctaaagaattggtcgatgttattaaaaggttaggcgttaaaggaataatacatagtgacgaattgcccaattacggtataaccgaagaaaatgttaaacaaattagggattttttaaacataaatgaagaggacgcttttattatttatttggttgaacctgaaaaatataaaattatcgctgaagcaataataaataggctaaacgaaatgataaaatctattcctaaagatactaggcaagctctagaggatggaactactgcttttcttaggccaaggcctggtgcatctagaatgtatcccgaaacggatcatccattaatttttatagaaaaaacaaaggatggctatttagtaaagtatggagacaaagagtttatttataaacccaaaaaaatcgattatgataaaatatttcaatacctaaaagaaaaaactaatgagaatttggctaatgccataattaagagcgaacatgtttattacattatggagctttttgaaaaatacaaaaacataaaaccaacaataattgcttccatattttttaaccctgatgtaaaaatagactataaaaagatagacattgccctaaatgctttgagtaagggtttaataacaaaagaagcgttagtagatgtaataaatagtgataaccctgaaaaaactattaatgaattaaaagctctatcaaaagaagaagcgaaaacaattattatggatttaattaaaaaacatggaaaaaaagctaaagccatagctttcaaagagttaagaaaaagagtagatccgaaaattattaatgaaattttccaagaattagaaggataa

SEQ ID NO: 773 - protein, 328 aa, Nanoarcheum equitans
MKAILKDVTSLVSNFNSKIIQKSLKEGKRAYIIVLPKFAGLLKYEIGKRRVAKELVDVIKRLGVKGIIHSDELPNYGITEENVKQIRDFLNINEEDAFIIYLVEPEKYKIIAEAIINRLNEMIKSIPKDTRQALEDGTTAFLRPRPGASRMYPETDHPLIFIEKTKDGYLVKYGDKEFIYKPKKIDYDKIFQYLKEKTNENLANAIIKSEHVYYIMELFEKYKNIKPTIIASIFFNPDVKIDYKKIDIALNALSKGLITKEALVDVINSDNPEKTINELKALSKEEAKTIIMDLIKKHGKKAKAIAFKELRKRVDPKIINEIFQELEG

SEQ ID NO: 774 - DNA, 1182 bp, Nanoarcheum equitans
ttggatagaatagaatattacaaaaaagttgccccttatataataaaatttttcgaaaatagagaggttgggattttatatcaaaaaaacaaatccttctttaggaggcctgtaataatagaatacgagcaagatttattgttagaagtaaaaaaaggggcaatgtcattccatatatctttagaaagatggaaagacccatctttattaggaaaagcgaacgaaaaagaattaagaattggttgggatttggttttcgatatagatacacaagatattgatatatcgaaggtaattgctaaacaaatagatatatatctaacaaacaagggaattccccattttataaaatattctggtaataaggggttccacataatagtgccatgggaagctttccctaaagagatagtatttgatggagagttaatagaactaaaagataggtttccggatttggccagattattattgtattataccattacaagagttaaagaaaaaattaaaaatgatttggaacctttgttagaggaaactggcaaagatgctaatgaattaatagagaattttatagttgatatggttgtaataagtaaaagacatttatatagggcgccttattctttaaatgaaaaaacgggcttagcatcgattcctgtaaaagacatatcaaatttcgaacctctcttagcttctcccgaattagtagaaccagtagattgggattttaatgtaaaagaaagcaaaagcttagagcaatttataaaagacgctttggtttttgacaaataccaaaaagaagaaaaatgggaaaaaataaaagagatcaaaagaaaaccgaaaactaatagaatagccccatgcatacaaaacatattaaaagggttaaaagatgggagaaagagagctgtatttattctaataaactattttagaagaaaaggctatagctgggacgaaataaaaagaattttaatggaatggaatcaaagaaacgaccccccattaagagaaagatatatagaataccaaatagagtggcatatgagaaaagaatctgaaggtgtacaatatttacccccaaattgcgatagaaccgaatattataaagatatgggtgtatgcgagaggggtaaaaaccctgaatgtgataatactaaaaacccattatccttctaa

SEQ ID NO: 775 - protein, 393 aa, Nanoarcheum equitans
MDRIEYYKKVAPYIIKFFENREVGILYQKNKSFFRRPVIIEYEQDLLLEVKKGAMSFHISLERWKDPSLLGKANEKELRIGWDLVFDIDTQDIDISKVIAKQIDIYLTNKGIPHFIKYSGNKGFHIIVPWEAFPKEIVFDGELIELKDRFPDLARLLLYYTITRVKEKIKNDLEPLLEETGKDANELIENFIVDMVVISKRHLYRAPYSLNEKTGLASIPVKDISNFEPLLASPELVEPVDWDFNVKESKSLEQFIKDALVFDKYQKEEKWEKIKEIKRKPKTNRIAPCIQNILKGLKDGRKRAVFILINYFRRKGYSWDEIKRILMEWNQRNDPPLRERYIEYQIEWHMRKESEGVQYLPPNCDRTEYYKDMGVCERGKNPECDNTKNPLSF

SEQ ID NO: 776 - DNA, 297 bp, Nanoarcheum equitans
atggttgatagaaagggcaaaggctttagaagaaaaacaagagataaactttctaaacatcctaggcaaaggggcaaacttactataactaggatattgcaaaagtttaacaataatgacaaagtagctatagttatagagccttcttggcattatgggatgccccatcctagataccatggattagttggtacagttgttggaaaaagaggcaattgctatgaagtagaattagaattcaatggggaaaagaaattacttatagtacatccagcccatctaaagaaagttggatag

SEQ ID NO: 777 - protein, 98 aa, Nanoarcheum equitans
MVDRKGKGFRRKTRDKLSKHPRQRGKLTITRILQKFNNNDKVAIVIEPSWHYGMPHPRYHGLVGTVVGKRGNCYEVELEFNGEKKLLIVHPAHLKKVG

SEQ ID NO: 778 - DNA, 639 bp, Nanoarcheum equitans
atgcaaatgcagattgaagagcaattaaagattatagaagatttggttaaaaaattaaatgataggttagcagttccatatatatgggagaaaactaaagaccctttttgggctttgatcgcgacagttctttctataagaaccagggaagaacaaacaattagagcttctttaaatttatataacaaatataaagattataaaaatttggctaaagcaccaatagaggaaatagaagatttaataaaaaatgttggattgtataagcagaaagcaaaatggattaaaaccatagctcaaagatgggattataataaaaaatgtgacgaaagctttataaggaatttacctggggtaggaagaaaagttggcaatgtttatcttaatttagtatgcaacaaaccctatatagcggttgatgtgcatgtccataggatagccaatagattaggttgggtaaaaaccaaaacccccgaggaaacggaaaaacagttatacaaaataatacccaaagagtattggcccaaactaaatcatatgcttgttttgtttgggcgaaatatatgtttaccttcaaagcctaaatgtgatatttgtccattagattgtccctataaatacaataaaaataaaccttga

SEQ ID NO: 779 - protein, 212 aa, Nanoarcheum equitans
MQMQIEEQLKIIEDLVKKLNDRLAVPYIWEKTKDPFWALIATVLSIRTREEQTIRASLNLYNKYKDYKNLAKAPIEEIEDLIKNVGLYKQKAKWIKTIAQRWDYNKKCDESFIRNLPGVGRKVGNVYLNLVCNKPYIAVDVHVHRIANRLGWVKTKTPEETEKQLYKIIPKEYWPKLNHMLVLFGRNICLPSKPKCDICPLDCPYKYNKNKP

SEQ ID NO: 780 - DNA, 855 bp, Nanoarcheum equitans
atggacatagataaaatactagaagcagggcgaatagctaaagaagccagggaatatgcacaaaaattatgtaaatctataacagatggattagaactagcaataaaagtggaagagtttattaaaaagagggccaaattagctttcccagttaatgtttccatccataatgtggcagcacattttagccctatagagcctatagagatgtatggagtagtaaaaattgatttgggcgcaaatgttgatggctatttatcagacacagcctttagttgtgatttagatggtaattacgaagaactagtagaagcatcaaaaaaagctttagagaacgcgtcaaaaataatgagatatggagtaactttatcagaaataggcaaaactattgaagaaacaataaaatcttatggtttcaatccaataaagaatttgacaggccattctatagaatataaccaattgcatgggggattatatattcctaattatgacaatggcgataaaacaattataaaagagggattatatgctatagaaccttttgctactatgggaaagggctatgttagaaatggccccccatctaatatatatattttagtaaaacctaagagagttagagacataagagctagaaaggttttgcaatacataatagaaaactatggatggttgccattcgccaaaagatggctaatagaggaattcggcccaatagatagagagctttactatttgcttaaagaaggaataatatatagttatccccaactaatagaggaaaaaccggtatcacaattcgaacatactttcttagtcctaaaagataaaaccattatcacaaccctttaa

SEQ ID NO: 781 - protein, 284 aa, Nanoarcheum equitans
MDIDKILEAGRIAKEAREYAQKLCKSITDGLELAIKVEEFIKKRAKLAFPVNVSIHNVAAHFSPIEPIEMYGVVKIDLGANVDGYLSDTAFSCDLDGNYEELVEASKKALENASKIMRYGVTLSEIGKTIEETIKSYGFNPIKNLTGHSIEYNQLHGGLYIPNYDNGDKTIIKEGLYAIEPFATMGKGYVRNGPPSNIYILVKPKRVRDIRARKVLQYIIENYGWLPFAKRWLIEEFGPIDRELYYLLKEGIIYSYPQLIEEKPVSQFEHTFLVLKDKTIITTL

SEQ ID NO: 782 - DNA, 993 bp, Nanoarcheum equitans
gtgagtattttcaaagaactaagcgatagtcttaaacaatatttaaaagaaggcaaagacccttttcccgatataattgggaataaaaaggctaaagaagatgttattagttgtttgcttagtgggaggcatttcttaattataggtccccctggcatcggtaaaactacattagctaaaagcatagctaaaattttgcccccaattgaaacagacatagaaccatattggttagaaggcaccccattcccaacaaagaaaacaaaaaagaaaaaaatagaagggataaaaaggtttgtacgtatacagggtagtcccgatttgaatcccgaggatatagttggcactatagacccaacaaaagcactaaaatatggcatatccatagaaagctttgtgccaggaaagatatttagagcgaatagaggagttttattttttgatgaaataaacagggctcctccgaaaatacaaaacctattattacaagcattagaggaaggttatgttagtttaggcccattcgatatagatgtgcctaccgattttatatttattgctacaatgaatccaaaagaatatgaaggaacaaccgaattaagcgaagcactaatggatagattagatataatctatttggattaccctgaaacattagaaatagaaaagcaaatagttttagaaaaaggcaaaaaattagttttatttccagacgaattgttagaaaaaatgttgtcttttattagagaattaaggaatgacgaaaatttagaaataaagcctagtcctagggctagcattggtatatatgaaagggcacaggcatatgcattaattagaaattctaaaaaagtggaatggcaagacatagaaagagcattcctaagtgtgttgccatctaggataaagcttaaaccacatgtagcaataaaaatggatgaacaacaatatataaaacaacttttggacaaggatactaaaaaaaaactataa

SEQ ID NO: 783 - protein, 330 aa, Nanoarcheum equitans
MSIFKELSDSLKQYLKEGKDPFPDIIGNKKAKEDVISCLLSGRHFLIIGPPGIGKTTLAKSIAKILPPIETDIEPYWLEGTPFPTKKTKKKKIEGIKRFVRIQGSPDLNPEDIVGTIDPTKALKYGISIESFVPGKIFRANRGVLFFDEINRAPPKIQNLLLQALEEGYVSLGPFDIDVPTDFIFIATMNPKEYEGTTELSEALMDRLDIIYLDYPETLEIEKQIVLEKGKKLVLFPDELLEKMLSFIRELRNDENLEIKPSPRASIGIYERAQAYALIRNSKKVEWQDIERAFLSVLPSRIKLKPHVAIKMDEQQYIKQLLDKDTKKKL

SEQ ID NO: 784 - DNA, 651 bp, Nanoarcheum equitans
ttggccatagctttagaggaattaataagatatgggcattatctttttggcgaaaaacctggttttggttatgaaaaagagataattggttatacccaagggttaaaacccatatgggatttagatttgaggaaaaccacttatatgttagctataacaaagaatttgctttattctctagtttttagagtgtataggcctttagcggaaaaggagtatatagttttattagattgtagtgggtctatgaaaggggaaaaatttgaaaaagctttagcgatagctttatctattatatataaatacaaaagggttggccttattttgtttaacaataaaataataaaatctattcccccaacagagaacaaaactttattggttaattctttgtttgttatcccaagagagaaaaccaatattagtattgcattagaagaagcaatgaaatatgctaaaccaaaaagtgagatttttataataacagatgctgttcccacagatgaaacagttgatgaactaatagaaacagttagaaaactggctttaaaaaatataaaagtccatgttattggtataaacctaaaagaaggcaaaatagttgcagaaacaatagcaaaaattagttcttctttattgtacgaattttaa

SEQ ID NO: 785 - protein, 216 aa, Nanoarcheum equitans
MAIALEELIRYGHYLFGEKPGFGYEKEIIGYTQGLKPIWDLDLRKTTYMLAITKNLLYSLVFRVYRPLAEKEYIVLLDCSGSMKGEKFEKALAIALSIIYKYKRVGLILFNNKIIKSIPPTENKTLLVNSLFVIPREKTNISIALEEAMKYAKPKSEIFIITDAVPTDETVDELIETVRKLALKNIKVHVIGINLKEGKIVAETIAKISSSLLYEF

SEQ ID NO: 786 - DNA, 924 bp, Nanoarcheum equitans
atgaaacctgttagagatttaaatgtaaataaaaacacaacaatagaagaattgataaaacagttttcttccattggaggattccaagcacaagaactgtatagaggttacgaaatattaaaagagatgtttgataatgccgaatacaaaatattaagttttcctgccgacattattgcaacagggattagagggataataaaagagttaataaaaagaaaaatgttcgatttagttataactacttgtggtacattagaccatgacttagcgaggttggaaaaagattattatttaggatactttgaagcggacgatatagagttgagagagaaaaacatatttagattgggaaacatttttattcctgaggaaaactatggtctggcaatagagaatatactaaaaaaagctttaccttatatttataataaaaagaaagagttatccacatatgaatttgtatggcttttaggggaatatttagaaaaccatcccaaaaaagaagaatctattatttattgggcttacaaaaatagaattcctataataatacctggcataaccgatggagcagttggtacccaaattttattgttcagacaagaacatagagattttaatgtaaatgtatggttagatgaagaatttttgctaaaccaattctttggggataaaaatataggcgcattaatgcttggagggggtatctctaaacaccacacaatatggtgggctcaattttccaatggtctaaaatatgctgtgtatgttacttctgcagtagagttagatggctctctctctggggctagaacgagagaggcaattagttggggtaaaatagacaaaaaagcaaaacatgtaactatttggggagatgtaactataatattgcctttattggttggaccattcctttaa

SEQ ID NO: 787 - protein, 307 aa, Nanoarcheum equitans
MKPVRDLNVNKNTTIEELIKQFSSIGGFQAQELYRGYEILKEMFDNAEYKILSFPADIIATGIRGIIKELIKRKMFDLVITTCGTLDHDLARLEKDYYLGYFEADDIELREKNIFRLGNIFIPEENYGLAIENILKKALPYIYNKKKELSTYEFVWLLGEYLENHPKKEESIIYWAYKNRIPIIIPGITDGAVGTQILLFRQEHRDFNVNVWLDEEFLLNQFFGDKNIGALMLGGGISKHHTIWWAQFSNGLKYAVYVTSAVELDGSLSGARTREAISWGKIDKKAKHVTIWGDVTIILPLLVGPFL

SEQ ID NO: 788 - DNA, 3153 bp, Nanoarcheum equitans
atggggaatatgccattacgaggattgaatagatctttagaagtcctattcgaagcggtattattaggtatattcctagctactagtgctttcgttataaacaaagctgtaaaatttggggaaaaaccttcaaatgtaatagattttttagttagttggtataatagcgaaaaaacttgtgaagacttaaatagtattagaaagtttttatccacagtttgtataaaagatggttattttatattaaaaaataacccaactgaggattgttcaacaatagctaaagaaaaccacatttctataaaaataggggatagaactacactagtatcggaaatactcaattctaaagtgttggttagtgaacaaacgggaagtttacatgatttatatgtaacatattgttctcctattttaataactcctcgctatagtaatatattatattttgaagttgatgcattaggcgaaatagacaaattattagacaatataaaaaaagttacagtggaagttagtagaataatctggaattgtgattttaaagatatagatagcgataataaaaaagaaatcgtatgcgatttaaatagcataccggaaacagcattaaaaccaggtaattatgaatttgtattcaattttaatactgttttagttagaaaaacctatataattgatggagagtatgatgaaaatggaaatggttatatttatattggaaaggccaaaatagatgcccaattagttaaaaaaacccctaatggttatattaaagcagatgtatgcgaagcagatgcgttgcaaaaaggaaaactaattttggaaaatcccctttataagggagaatccgtagaaggaataccaactaaatgttttgtcaaaataaacccattatttaaggaaaaagctgttggcaaatatataggcaattattttatagaaacagaaaaaggagatctaacttatttagaaagggaaacttactattatggaaaaggcctagaagtcaaatgtttcgcaaaagatggattacacataagaaagattaattccaacatattatcgaaaattgggaaaaggttatgtagcatatataagcaaattgaaggttttaccatatgtactccagaaggtaagcccggtaaaagaatagaagcatatgatatttgcggagaattcgaaacagattttaaaatattgattaacaaagaagaaaatattaaactaaaaatagagccaacaaaaaaagagtataataatatggagatttttgtaaatggcgaaaaatgtgataaagaggttaattattatatatgcgaaacaaacaaagataacataaaaattgaagcaagatatgacaattactatatagggtgggcccaactaaatattaaagggaagggtagcgcttatatagaattaaatagtggagaagcaaaaaatattgaacttgctccccctagtatagatgtagaaaagcttgctaataaggttatcataaaaataactgcagacaaagaaattaaaactgtttgcaaaaaaataaactatattaatatatattttagcagttgtgaggggaaaatatgtttagtaatagaatacccttgcggtgcgaaattagatataaaagacaatactgttataataacaattgattatgaaaaaataaaagagataaagagagatggaaaaacctttatgtttattaaaaaaccacagtatggattaaagatatatagggacaaatattacctttgcgatggagttttaaaagaaaatcatatagaagcaaattgctcttttgatgatagaatagaagaaattgatttatggtacaaggtacaattaaaggcttactattatataaataataaaacattggaagttttaccttatatagctatttacaataagggcaaacctttagagttattgccatctaaatttgataaagaagaattctacaaggctttcgagaaagaactaaaaagagaagcggtaaacttattaaaaaacccttacaaattaataacattgaattttttcatattagatgatggcaaatctatatggcttaacaatactgtaatagctatagcttatgcgtgcaaatggagagaaaacaaatttgtgtgtcctatggattggaatgagaataacaaattagacagagatgaaaaaagaattatacctttacacattatctctgaaatagataatataaagcccatagattacgattttgtttttagcgtatattctcgggggttaacggatagtcccgaatatgtgttagatacaataaaaatatcttttatcccagcattaaaagaaatagatactcctaaaggatataggctgaagtatgggttgaaaaaaatatgggtagacgaaaaacctaatgttcatattataaataattatgatatagtttatttcccccgaagaacagctttagtcataagtaggaacaaagtttatggagtaatagaaagctggccccacgctatagttaataactattttcctgtatggggaggggataaactagaactaagaaagttcccagaaaaaactttctttaaagaatacgaagacaaaggctggttctctagtactacctatacttactatactggcgattggattggtttattttttaaaactaataaggattcatatcttgtaaaagatgtctatggttatttgtttctagtagacaaaaataataatgttctagctatagtatttactcccagtaataatatggatggcaatgacatagatagaaaaatcctagttaatggcgatcccctatttgggaataaacatatcatattattccacatagatacaataatagtgcccttagtttatgataaatattcctttcctatcgaagttaattcaacctttttagattatcttaactacgctttaagaaagttagcctatgaatatgtgtacaaaagagctaaagatattataggttatccccaattggtaacaatgttttatccttatataacattaaaaccgcatagctatacatttaataatgaagatacaaaaaagatactagataacctaaaagaagagctaaaggttttcaatgttatttataaattgtctgacaaacaaaaataa

SEQ ID NO: 789 - protein, 1050 aa, Nanoarcheum equitans
MGNMPLRGLNRSLEVLFEAVLLGIFLATSAFVINKAVKFGEKPSNVIDFLVSWYNSEKTCEDLNSIRKFLSTVCIKDGYFILKNNPTEDCSTIAKENHISIKIGDRTTLVSEILNSKVLVSEQTGSLHDLYVTYCSPILITPRYSNILYFEVDALGEIDKLLDNIKKVTVEVSRIIWNCDFKDIDSDNKKEIVCDLNSIPETALKPGNYEFVFNFNTVLVRKTYIIDGEYDENGNGYIYIGKAKIDAQLVKKTPNGYIKADVCEADALQKGKLILENPLYKGESVEGIPTKCFVKINPLFKEKAVGKYIGNYFIETEKGDLTYLERETYYYGKGLEVKCFAKDGLHIRKINSNILSKIGKRLCSIYKQIEGFTICTPEGKPGKRIEAYDICGEFETDFKILINKEENIKLKIEPTKKEYNNMEIFVNGEKCDKEVNYYICETNKDNIKIEARYDNYYIGWAQLNIKGKGSAYIELNSGEAKNIELAPPSIDVEKLANKVIIKITADKEIKTVCKKINYINIYFSSCEGKICLVIEYPCGAKLDIKDNTVIITIDYEKIKEIKRDGKTFMFIKKPQYGLKIYRDKYYLCDGVLKENHIEANCSFDDRIEEIDLWYKVQLKAYYYINNKTLEVLPYIAIYNKGKPLELLPSKFDKEEFYKAFEKELKREAVNLLKNPYKLITLNFFILDDGKSIWLNNTVIAIAYACKWRENKFVCPMDWNENNKLDRDEKRIIPLHIISEIDNIKPIDYDFVFSVYSRGLTDSPEYVLDTIKISFIPALKEIDTPKGYRLKYGLKKIWVDEKPNVHIINNYDIVYFPRRTALVISRNKVYGVIESWPHAIVNNYFPVWGGDKLELRKFPEKTFFKEYEDKGWFSSTTYTYYTGDWIGLFFKTNKDSYLVKDVYGYLFLVDKNNNVLAIVFTPSNNMDGNDIDRKILVNGDPLFGNKHIILFHIDTIIVPLVYDKYSFPIEVNSTFLDYLNYALRKLAYEYVYKRAKDIIGYPQLVTMFYPYITLKPHSYTFNNEDTKKILDNLKEELKVFNVIYKLSDKQK

SEQ ID NO: 790 - DNA, 762 bp, Nanoarcheum equitans
gtgataaagaagaaaacattacctaatgttggagaatatatagttgcaaaaataatcaaaatagacccagccgcagctatagcagagccattagaatatgaagcagatgctattttgccatttaacgaagttgctagggggagaataaaagacataaaagatcatgttagggttggtcaaatagttgtaggcaaagtaattagagttgatcctttatcaaaaactatttattttagcttaagaaaggcccacccccaagaagtaaagagaaagctatccgaatttagaatggaacaagcagctaacaaaattttagagttattagccaataaattaaatgaagattacgaagcaataagaaagaaagtcgcagagcccatattaaaaaaagaggtttctttatacaaagcttttttagaaatagctaaaaacccggaattgttaaaaaaatatagaattcctaaaaaatatgccgaaccgttattggaaataataaaagaaagaataaaaccaaaaaaatatgaaataaaagctttaatcgaattatatacaatagaaaccgatggcattaataggattagaaaaatttttgaagaaatagagaatttaggattcgaagccaaataccaagggtctggtaaatattatattagaatagaaggcgaagacccaaaggaattggaaagaaaattaaaaactataaacgacataatagaaaaatatataggcaatggggaatatgccattacgaggattgaatag

SEQ ID NO: 791 - protein, 253 aa, Nanoarcheum equitans
MIKKKTLPNVGEYIVAKIIKIDPAAAIAEPLEYEADAILPFNEVARGRIKDIKDHVRVGQIVVGKVIRVDPLSKTIYFSLRKAHPQEVKRKLSEFRMEQAANKILELLANKLNEDYEAIRKKVAEPILKKEVSLYKAFLEIAKNPELLKKYRIPKKYAEPLLEIIKERIKPKKYEIKALIELYTIETDGINRIRKIFEEIENLGFEAKYQGSGKYYIRIEGEDPKELERKLKTINDIIEKYIGNGEYAITRIE

SEQ ID NO: 792 - DNA, 891 bp, Nanoarcheum equitans
gtgatacctctaaaagaggcatacaaatataaagaattagtaggaaacaaagcttattatttatcgttagttaaacaaaaatttttaactccaaatgggtttgtggtaactttagaggataatgattataccatagaaaaagccctaaaccaatataattatagattttactcaattaggtcttcttcttttgatgaagatacaaaagaaaaagccaatgctggtaaatatgaatcctatataagagtgccaaaaaggaaagcgttgttttatattaagaaaatacaagaaaagggaatacctgttttagttaccaaatatataaaagcccaataccatggagtaggatttgtatataataaaacaataatagaattaagcaagaggtttgccacagaagaaagcgatgttatatacattgatgggaaaagaatctataaaaatttagatttatttaataaaaaggttgacagcttattagatagaataaagaacaaaattaatgaaattagaaaatatatgggttttgacattgatatagagttcgcatataataagagattatacgttttacaagttaggcccataactaaaactatcccagaaaaccctaacattatagttattagccctggcataatggaaggccctgtaaaatacataaaaagcgaaaaagataaaatagagggtattatatatgtgaataggctatactattggctctccaaatatttagacaaaataaaaggtataatagtaaaagagccaacatttctatcgcatttagcgataaatttaagagaaaacaatattccatgtgtagcattggattttgttcccaagtatgttagaataaatacttataaaggcatatttgaatatgaaaagtga

SEQ ID NO: 793 - protein, 296 aa, Nanoarcheum equitans
MIPLKEAYKYKELVGNKAYYLSLVKQKFLTPNGFVVTLEDNDYTIEKALNQYNYRFYSIRSSSFDEDTKEKANAGKYESYIRVPKRKALFYIKKIQEKGIPVLVTKYIKAQYHGVGFVYNKTIIELSKRFATEESDVIYIDGKRIYKNLDLFNKKVDSLLDRIKNKINEIRKYMGFDIDIEFAYNKRLYVLQVRPITKTIPENPNIIVISPGIMEGPVKYIKSEKDKIEGIIYVNRLYYWLSKYLDKIKGIIVKEPTFLSHLAINLRENNIPCVALDFVPKYVRINTYKGIFEYEK

SEQ ID NO: 794 - DNA, 477 bp, Nanoarcheum equitans
atgataaaagcccaggttttttatgacgctttgggtgctccaaaagaaaatgttgtttcttttttaaaagatttggttgaaagaataaagcaatacgaaggagcaaaagttattgattataaaatattagagccagaaccccaaggaaataacttgtattcttctgtagcaatattaataatggaattcgaagatttgtttagagtatttcaattcgttttagattaccctccagcgacaatagaaatactatatccggaaggcccagatcaattattaagagatatagagaaagaattatccaaatgcgttgataaagaaaaagtaaaccaacttagaaaagaaattaaagctttgaaatctttgataccaacgaaagctactttaaatttgattttaaacgatttagcaaccaaacaacatcaaatggggttgctaattaaagaattacaagcgaggttgcaacttcaacaatag

SEQ ID NO: 795 - protein, 158 aa, Nanoarcheum equitans
MIKAQVFYDALGAPKENVVSFLKDLVERIKQYEGAKVIDYKILEPEPQGNNLYSSVAILIMEFEDLFRVFQFVLDYPPATIEILYPEGPDQLLRDIEKELSKCVDKEKVNQLRKEIKALKSLIPTKATLNLILNDLATKQHQMGLLIKELQARLQLQQ

SEQ ID NO: 796 - DNA, 603 bp, Nanoarcheum equitans
atgttgaaatttatcgctttattgatagttagctatattatggaattgcttgcccaatctataaatatcggtttaaacctaactataaatgatatagttgtattgtcgataattataataattgaaaccgtattattgatatgggctatagaattagcgcgttccataattgttggttattctataaaagaatcgatagagagaactaaaaaggtattgcctgttttaataaaataccattcagctttcaaaatattaaacatatctttattattgctatcgctctatttgtttaaccaaataatgaaaaacccgatgaatatggttttgttgttatcaacaattacattacttatattccaattgcttttgctattattgacaatatatccaacatataaagcattgcataacgaaactaatacaaaaaaacttatagcatatacattttctttgccatcaatgttattctcatttgttttggttttattgtttattcctatcctttttataccttttaagtttatatatttatcagttttgtttataattagttggtttgtgtattatttttcgaaaaatttagaaaaaatctattgttga

SEQ ID NO: 797 - protein, 200 aa, Nanoarcheum equitans
  signal (1)..(18)
MLKFIALLIVSYIMELLAQSINIGLNLTINDIVVLSIIIIIETVLLIWAIELARSIIVGYSIKESIERTKKVLPVLIKYHSAFKILNISLLLLSLYLFNQIMKNPMNMVLLLSTITLLIFQLLLLLLTIYPTYKALHNETNTKKLIAYTFSLPSMLFSFVLVLLFIPILFIPFKFIYLSVLFIISWFVYYFSKNLEKIYC

SEQ ID NO: 798 - DNA, 783 bp, Nanoarcheum equitans
atggttgaaatagagaatttaactaactatataaaacaaaaatacaaagtaaatgatagagtagcaaaaaatttggcccaatatatgttagagcaatataaatatttgcttatcccaaagagagacgaactattaatagaggtatatccccataatgacatagaagaatacatttttcatactgttttaggaagaaaagcaaacgatgctttgtctagagctttcgcttatttaattagtaaagaaaagcgaactaatgtaagaacagttgtatcggattatggtttttctataatagtgccaaaagagaaagcattaaaaaaagtagagttgttaggtttattatcaataaaagaagataaattcgaagaaatattaagagaagccattaaaaatagcgagatgtttaagagggtgtttagacatgtggcaaatacagggttaatgatactaaaaaaatacatgggaaaagaaataccaatatcgaggcaacaaattaatgcagaatcgttattgaatttccttttagagcattacccagattttcctttattgaaagaaacatatagaacaattctagaggataaaatggatatattccatgctaaagaatttatgagaaaagttaaaaaaatgaaaatatatataaaagaagtggaaatgccttctccatttgcatggcatttagaagtatggggccaaagtgatataatatttatgcaagataaaaaagagatgattaagagattgcataagaagttattaagaaaaataaaggagtag

SEQ ID NO: 799 - protein, 260 aa, Nanoarcheum equitans
MVEIENLTNYIKQKYKVNDRVAKNLAQYMLEQYKYLLIPKRDELLIEVYPHNDIEEYIFHTVLGRKANDALSRAFAYLISKEKRTNVRTVVSDYGFSIIVPKEKALKKVELLGLLSIKEDKFEEILREAIKNSEMFKRVFRHVANTGLMILKKYMGKEIPISRQQINAESLLNFLLEHYPDFPLLKETYRTILEDKMDIFHAKEFMRKVKKMKIYIKEVEMPSPFAWHLEVWGQSDIIFMQDKKEMIKRLHKKLLRKIKE

SEQ ID NO: 800 - DNA, 1389 bp, Nanoarcheum equitans
atgatagagcctctatataagtttaaactctatttcccgataacaaaagcgtttgctataacaaaaatattatataattgggggaaagcccatctaatattatcgaagaaaaaatcccttaatatagaatatagggaagaaatagaaaaagaactggccaaggtttattgggccttagatttaataaataagcttaatttgatatctatttgggatttggtttttactaagaaaaagcgctatactaaagaggaagcgagagcttatttttattctattttacccaaattagaaaaactagctgaccaatatgaaaagcaaattttggctaaattggaaaacaaaaaatacaagatagaaaaaataaaaattgactggcaaaagattttggcttataaggaatatttggaaaacaaattagagtatttgaacgcaatagaatactctttcaaaaaaggagtaatattaatggttagaggttatataccaaagagatctttaaacgaattagttgatctattaaaagataaacccgtaattttagagataaaagaagccaaagaaggccccactttattaaataaccccccaatagttagagatttcgaatatttaatagagctattctctataccaaattataaagaaaaagaccctaccttgtatatagctttgtttttccctatattctatgcaataacatttgcagacatgggatatgggttattatcattagtatttaccttattattaaaaaggtatttcgacaacacaaataacaaaaagctatttactatcctattggttagctctttaatatctatttttgttggttttgtttttggaagcttatttacttatcctatatccaatgggctaaacatacaagatcccctaattcttttgggattacctatagctataggagtaatacatttaactatcgcttctattttaggaaaaaaagtttttgaacttatagcaattcctttgatagggtatataactatatgcttactattaaaaatgcccataaataatataattgtatacgcgttcgccccattgataatttatagtatatggaaaaacagattgcaattttattctccatttttagaattactatcgaaattgcttagctatattagattaacagcattggcattagccacaaatatattgcaaatagccctaacatctatattccctaacccaataaaaattgttgctataccctttataatattgtttaattttatcttatctattctaagtgggtttatacattctttaagattgcattatgtagaggcatttagtttgtttttccagggcaatggtataaaatataaaccattccgtcctaagaaagaatggttgaaatag

SEQ ID NO: 801 - protein, 462 aa, Nanoarcheum equitans
MIEPLYKFKLYFPITKAFAITKILYNWGKAHLILSKKKSLNIEYREEIEKELAKVYWALDLINKLNLISIWDLVFTKKKRYTKEEARAYFYSILPKLEKLADQYEKQILAKLENKKYKIEKIKIDWQKILAYKEYLENKLEYLNAIEYSFKKGVILMVRGYIPKRSLNELVDLLKDKPVILEIKEAKEGPTLLNNPPIVRDFEYLIELFSIPNYKEKDPTLYIALFFPIFYAITFADMGYGLLSLVFTLLLKRYFDNTNNKKLFTILLVSSLISIFVGFVFGSLFTYPISNGLNIQDPLILLGLPIAIGVIHLTIASILGKKVFELIAIPLIGYITICLLLKMPINNIIVYAFAPLIIYSIWKNRLQFYSPFLELLSKLLSYIRLTALALATNILQIALTSIFPNPIKIVAIPFIILFNFILSILSGFIHSLRLHYVEAFSLFFQGNGIKYKPFRPKKEWLK

SEQ ID NO: 802 - DNA, 330 bp, Nanoarcheum equitans
ttgttgttttgtagtttaatggaaattatcaaagaagaaccaatcactaatgaaaaagcctatcaaatattggctaaacaaaaacaattatcttatagagcagaaagaacgaaaaagtatttggaaaaaatcggttttataaagaatagtgacgaaatattaaagcaattggttgatttaggcatagagttggaaaaagcgataatgattgtaaatactatgccaaaaacaaacgatgaagtaagggctatattagaaaaagattacacccccgaaataggcaaaaaagtattagaaataatgaagaaggctttaagctctgaaaaatga

SEQ ID NO: 803 - protein, 109 aa, Nanoarcheum equitans
MLFCSLMEIIKEEPITNEKAYQILAKQKQLSYRAERTKKYLEKIGFIKNSDEILKQLVDLGIELEKAIMIVNTMPKTNDEVRAILEKDYTPEIGKKVLEIMKKALSSEK

SEQ ID NO: 804 - DNA, 1332 bp, Nanoarcheum equitans
atgccaaccaaattttatttaacagaccacgcggatgggggagtgatagtaaagttctttaaagatagggaatcagtaaaaagctatgctaatgttgatgaagatttctttaaaagagataatgctatttttgtaaaaaaagatagagattatctaatagtttatgtaaaagacgaatggaaagcctatttcttagcaggaagatatataaaaaatagtccgttcaaagaatttataatagatttaagagaaatagagagcaaagataaagccattattgggattctttctacatcttatatatttgatagatacaaaagcgaaaagcaagagaaaataataaaatttatttgcgatgacaaagagaaggtaaaagaatatatcacattaatggaagcacaatatttagctagggatttagctaacgaacccccaaatgtattaaatcctgaaacatatgaaaagaaaataatcgagatatttaagggattgcctgtaaatataaaagtattacattacgacgatttaataagagaagggttaaacttattggtttatgtaggcaaaggcagtatatacaaaccaaggttagttattttagaatacaatttaaaggacaaccctattgttttagttgggaaagcaataacctttgatacaggaggttattcgttgaagcccacagattatatgtataatatgcatggagacatgtccggttctgccgcagtaattggggcgctatatgcaatagctaaaaacaaaaaagatattccaatagttgcgttaatacctatagcagaaaatgttatttcaggagaatcctataaagttaatgacataataaaggcttataatgggaaaactgttgaagtaactaataccgacgcagaaggaagattaacattggcagatgcaattgcttatagtgcaaaatataatccaaaagccataatagaggtttcaacattaacaggaggacaaataatcgctttgggccacgaaatcgccgcagcgatgggggaaaaagatttagtaaataaagcaattgaagcgggaaaggaagtctacgaattggtatgggaattacctttatatgaaggttatagagaattattaaaaagtgctgtagcagatattaagaatgctaatgggagagaagcgcatgcaatccagggagggctatttttgaaagagtttagccctatagaaaaattcctacatttagatatcgctgggccagcgatagctaatagggcaataccaagcgcatacaaaggattaacggggtttggggttaggttattatataaattggttcaaaagctataa

SEQ ID NO: 805 - protein, 443 aa, Nanoarcheum equitans
MPTKFYLTDHADGGVIVKFFKDRESVKSYANVDEDFFKRDNAIFVKKDRDYLIVYVKDEWKAYFLAGRYIKNSPFKEFIIDLREIESKDKAIIGILSTSYIFDRYKSEKQEKIIKFICDDKEKVKEYITLMEAQYLARDLANEPPNVLNPETYEKKIIEIFKGLPVNIKVLHYDDLIREGLNLLVYVGKGSIYKPRLVILEYNLKDNPIVLVGKAITFDTGGYSLKPTDYMYNMHGDMSGSAAVIGALYAIAKNKKDIPIVALIPIAENVISGESYKVNDIIKAYNGKTVEVTNTDAEGRLTLADAIAYSAKYNPKAIIEVSTLTGGQIIALGHEIAAAMGEKDLVNKAIEAGKEVYELVWELPLYEGYRELLKSAVADIKNANGREAHAIQGGLFLKEFSPIEKFLHLDIAGPAIANRAIPSAYKGLTGFGVRLLYKLVQKL

SEQ ID NO: 806 - DNA, 291 bp, Nanoarcheum equitans
atgatgaagaaaaaattcgaagaagcattaaccaaattcgaagagtttgggttggtaacattagcattagcattcgtttttttggttttagtattgtatccattgtttatgggagtagcttttgcttttgtagggttagtttttaacaatataccttatgcacataatgcaatagtttatacattaaagcaatttggcttagattttactaataagttagattatctaggattcttcgctggggtactattggcatacctttcaatattagtaggagaattccgaagatga

SEQ ID NO: 807 - protein, 96 aa, Nanoarcheum equitans
  signal (1)..(42)
MMKKKFEEALTKFEEFGLVTLALAFVFLVLVLYPLFMGVAFAFVGLVFNNIPYAHNAIVYTLKQFGLDFTNKLDYLGFFAGVLLAYLSILVGEFRR

SEQ ID NO: 808 - DNA, 582 bp, Nanoarcheum equitans
atgatcgagatattaatagcaatattagatatagttttatctatttggaacgcttacgcttcagggtataatagtgtattgctaagaaaattagagttttctaacgattggaagataaccctattcagtatagcgaaccagtttgctttagtcttagcatttgctggcgcaacatatggtacagcaataatattaggatatatattaatgtatttgcattatattagctataaagcgctaatcgctttattgtcgctaaacaatttagtttttggaggtttaatagtattcactggtatagttattactatacaatccatagtgcaagcatcagtaactaaaaaagctatagatattggagtggcgatatataacactatagcgtctttgtttaacctaatacaatacatacaagctttccccgctttaacagaaacctggaacgaaagcgaagaagaaaacaaaaaccaagcgttaatagtattagccttagctgcttttattggaatagtattaacattttatgcctataagatgggaagagaaaaagcattaaaagaaataaattattcaatcgcataa

SEQ ID NO: 809 - protein, 193 aa, Nanoarcheum equitans
MIEILIAILDIVLSIWNAYASGYNSVLLRKLEFSNDWKITLFSIANQFALVLAFAGATYGTAIILGYILMYLHYISYKALIALLSLNNLVFGGLIVFTGIVITIQSIVQASVTKKAIDIGVAIYNTIASLFNLIQYIQAFPALTETWNESEEENKNQALIVLALAAFIGIVLTFYAYKMGREKALKEINYSIA

SEQ ID NO: 810 - DNA, 699 bp, Nanoarcheum equitans
atgaagcttaacacattaaagaatttattacccattatatttttctttctagggtattttttcgcaaaatcctttgataaatctatagaaataaacgaaagcaaactaattgaagtaccagcggtagctattgctgatggagggggagtattaactaaaatccaaattactgctaaaccaggaaaagggcatatatatttagatataaagcccttttccgaaccaacaacacaacaaagcttttataatgctgttaaagccgcttactttgtaacaaaatccaacaaaaaatatgattttacaatatcggttaaagctaatacttctttaattggggggccctcagcaggtttggcagtagctttaggggtaagtgcattgctattggacaaaaaactaaaaaattgtgttgccacaggagtagtagatagttatggtaatgtttaccctgttgggggtataatagaaaaagccaaagcagttatgcaaaaatacaattgctttataataccgtggcaaaacagatattatactgtttatttgtataaagagaagtgccacacaatattagggataaaaacttgtacaatggtattagagccaaagcaaatagatttggtccaatattttaaacaatttaatttcactataatacctgttaaaaatctaagagaagcaataaattatgcgattgaataa

SEQ ID NO: 811 - protein, 232 aa, Nanoarcheum equitans
  signal (1)..(22)
MKLNTLKNLLPIIFFFLGYFFAKSFDKSIEINESKLIEVPAVAIADGGGVLTKIQITAKPGKGHIYLDIKPFSEPTTQQSFYNAVKAAYFVTKSNKKYDFTISVKANTSLIGGPSAGLAVALGVSALLLDKKLKNCVATGVVDSYGNVYPVGGIIEKAKAVMQKYNCFIIPWQNRYYTVYLYKEKCHTILGIKTCTMVLEPKQIDLVQYFKQFNFTIIPVKNLREAINYAIE

SEQ ID NO: 812 - DNA, 339 bp, Nanoarcheum equitans
atgtggccctttaagaaaaagaaagaggaaaaagaaatagacaatctaaaagccatggggttagatgatgaaactttaaacaaagcaatggaaaaactaaaagaacttagcgacaataagatatgttttatatgtggaaaccccgtaggggaaaatgattacgaaactttagaagttttaggcacaaccctatatatgcataaaaaatgtaaaaagaaattacaaaaacagttattaaaactaatgaggagtgggcaattaaataaaatattagagcaatatgcccagctattaaagaacatggatagctttgaattcaaagcgaagtttgaaaaatga

SEQ ID NO: 813 - protein, 112 aa, Nanoarcheum equitans
MWPFKKKKEEKEIDNLKAMGLDDETLNKAMEKLKELSDNKICFICGNPVGENDYETLEVLGTTLYMHKKCKKKLQKQLLKLMRSGQLNKILEQYAQLLKNMDSFEFKAKFEK

SEQ ID NO: 814 - DNA, 1539 bp, Nanoarcheum equitans
atggatctaaaggaatatgtattaaaagggtttttttacccggcttccgaaatttataatagtatagccggtttttatgattatggttatttgggcacactattaaaaaacaattttattaatgaatggaaaaactattttcttagattgcatcctaacttttgggaagtagatcccgcaatagtgatgcctaaagaagtgtttatcgcgagtgggcatttagagaattttaatgacccgattgttgaatgtaaaaatggccatagatttagagcagaccatctaatagaggaaaagctaaacataaaagcggaaggtctgtctttatcagaaatggaagagctattaaaaaatgttagatgccctatatgtaatgcaccattaggaaaagtaaaatggttcaatttgatgtttcccatttatattgggcccgattcccaagaggcattgaacctattaaaaaacctaaaagaaaatgtgagcgaacaatatataaaagatattatcgaaagagttaaaaaaatggttgaaaatgaagcttatttaaggccagaaacggcccaaggcccatatgttatgtttaaaagagaattcattttacatagacaaaagcttcctttgggtttagcagtagtaggaaaagcttttaggaatgaaattagtcctaggcaattattattaagattgagagagttcacacaagcagagttacaaatattttttgatcctgaagataatgaattcgatataaatgaagtaaaagatgtagaattaaactttttagacaaagaagggaattacaaaagaattaaagtaaaagatttgccattcccagagttttatgcttattttgtagggaaagtaaagcaattctatgaaagattgggaatccccgaagaaaggcttaggtttagagagttaagcgaaaaagaaaaagcattttataataaataccatgttgatatagaaataaatttcccaacctatggatggaaagaagttggtggtatccattatagaacagaccatgatttgtcgggccatatgaaagtttctggcaaagacctaactgtgcaaaaagacaataaaaagtttatcccccatgttttagaattatcttttggtgttgataggaatgtattagctctaatagatttgttcttaactgaagaagagtacgaaatagagagggataatcaaaaagttaaggaaaaaagagttgtactaaagataccaaaacatctagccccaataaaagtggcagtattcccattattgaaaaaaccagaactaatagagaaggccaaagaagtatataatatgctaaaaaactatttctacccaataatttatgatgaacaaggctctatagggagaaggtacagaagggtagacgaaattggggtaccttatgcaataacaatagattaccaaactttagaggacaataccgtaacaattagagatagagatacgatgaaacaagttagagtaaaaatagaagacttgcccaatcagctaaccctctcgtcatcataa

SEQ ID NO: 815 - protein, 512 aa, Nanoarcheum equitans
MDLKEYVLKGFFYPASEIYNSIAGFYDYGYLGTLLKNNFINEWKNYFLRLHPNFWEVDPAIVMPKEVFIASGHLENFNDPIVECKNGHRFRADHLIEEKLNIKAEGLSLSEMEELLKNVRCPICNAPLGKVKWFNLMFPIYIGPDSQEALNLLKNLKENVSEQYIKDIIERVKKMVENEAYLRPETAQGPYVMFKREFILHRQKLPLGLAVVGKAFRNEISPRQLLLRLREFTQAELQIFFDPEDNEFDINEVKDVELNFLDKEGNYKRIKVKDLPFPEFYAYFVGKVKQFYERLGIPEERLRFRELSEKEKAFYNKYHVDIEINFPTYGWKEVGGIHYRTDHDLSGHMKVSGKDLTVQKDNKKFIPHVLELSFGVDRNVLALIDLFLTEEEYEIERDNQKVKEKRVVLKIPKHLAPIKVAVFPLLKKPELIEKAKEVYNMLKNYFYPIIYDEQGSIGRRYRRVDEIGVPYAITIDYQTLEDNTVTIRDRDTMKQVRVKIEDLPNQLTLSSS

SEQ ID NO: 816 - DNA, 1266 bp, Nanoarcheum equitans
atgaaggtatacagaaccggtaagataaacctattcaaaacagcagaacaagtaggtaaagacaaaatatatgaaacaaatctaacatcaggggatataattttgaatctagggaacaaaccagatttaatagagaagctattacctattgaaaagttaaatgagccaattgggtctgtatttgttgtatatgaaggaaatactgatttagcagagaatatttacaattatttatctaacaaaaaacaaattgggtctgctatttttgtttataacaaaccaaagaaagttggccaatatatgacaatgaaagagctaatacccgcgaaaatatacaataaagaagctgtggaggaaggagaacaaccatttatacatactttaaataaagagccatcgttaagcgatttctataattctaatctaagacctggcaaaaaaattatggaatctctaatgtatatgcatggaaaagaaggagatgcatcaaaatcttatggtttgtctagtaaattgggccaatatttaatagctccaaagtttttgcctaaagcagttttagtcaatttagaagatatatatgatattaaggattttgccaacaaaaagttcgacgaaatatctaatatgttaaatagcaaatatttagtaataaaaccggcctttggtcaagaatctgggggttattctgttggagtggctaaaaacaaaaataggtttgctaaggcattagaaagttttgtgttatatgcacaagaaaacgatttgcctccaatagctttggtgcaagcttatatggaaccactatttgctaagaaagatgataaatttgttagtttctttattagggtacatcccggagaagaatgttctttggttagtgctaaaatttctgcttacggaacatcgcccaaaaaaataataaagggacatctcgataatagaaaagaatttgatctaagtagcggtgctacagcatttcaatctttttgcctatataatgatgggagagtagaagagctatttaggggtagcaaaaaaggaattgaaactatagatttaaaggatagtattgtaatatatgaaggcagagaaatgaaattcgaagactttttaaaagaaatagagccacattcagtaaacatagtacaagaaatggagaataacattaataacataaaactaagcgcgttggatatattaaaaaatattagatctaaactaaaggggcaacaaattgtttctgtagataaatttataaaatag

SEQ ID NO: 817 - protein, 421 aa, Nanoarcheum equitans
MKVYRTGKINLFKTAEQVGKDKIYETNLTSGDIILNLGNKPDLIEKLLPIEKLNEPIGSVFVVYEGNTDLAENIYNYLSNKKQIGSAIFVYNKPKKVGQYMTMKELIPAKIYNKEAVEEGEQPFIHTLNKEPSLSDFYNSNLRPGKKIMESLMYMHGKEGDASKSYGLSSKLGQYLIAPKFLPKAVLVNLEDIYDIKDFANKKFDEISNMLNSKYLVIKPAFGQESGGYSVGVAKNKNRFAKALESFVLYAQENDLPPIALVQAYMEPLFAKKDDKFVSFFIRVHPGEECSLVSAKISAYGTSPKKIIKGHLDNRKEFDLSSGATAFQSFCLYNDGRVEELFRGSKKGIETIDLKDSIVIYEGREMKFEDFLKEIEPHSVNIVQEMENNINNIKLSALDILKNIRSKLKGQQIVSVDKFIK

SEQ ID NO: 818 - DNA, 3732 bp, Nanoarcheum equitans
ttggtgtattatgatatactagctaaggaattagaaaaactatatgaaattgctgaaaaagctagagcacaaggatatgatccaaaggacattgtagaaataccattagctaataacatgggggaaagggtagcccatttaattagtgctatccatgaacaattagatgtaaaaaagacagccgaactaatattagaattagaaaaacagtatggctttttggattggcgtgttggtttaaaattaatagattacgcattagaaggaaagctaattccttatgatgatatactaaaaagaattgacttaggagtaagattagccttaggttatataactatgggagttgtctcagctcctttggaggggttagtagagcttaggataaaaaagagaaaagatggaaaaccttatttggctttatactatgctggccccataaggggggctggtggtactgcggcagcagttagtgttttatttgctgattatgctagaaaaaaagccggtttatatgaatatgacccaacaaaagaggaaatagagcgctataaaatagaaatcgattcttaccataacaaagttgcgagattgcaatacaaaccatcagacgaagaaatagagttcttagtaaaacatatacctgtggaaattaatggagaccctacttctgataaagaagtaccttcctacaaaaatctagaaagggtagaaactaatagaattaggggagggatgtgtttagttattgctgagggtatagcgcaaaaagccaaaaagatctatggtaaaataaccgagtggggtaaagaattcggtttagaacattgggaatttttgggagaatatttaaaattgcaaaaagagatacaagccaaattagctgcagagtctggaggtgaaatagaaggtaaagaaataaaaagaaaaataactttgtttttagatgaaataaaaaaagaagaaataacagttaaatatcccactcctgcaggtaaatacttacaagaaataaccgcagggagaccaatattttctttgcctatggccattggagggtttagattaaggtatggtagatctttcgctacaggttttgctacctctggcatacaccctgcgactatgtttttaacctatggatttttagctataggcacacaaatgcgtggggaaaggcctaaaaaatcaacaatagttactcctgtaacttctttgcatcccccaatagttaaactaaaagatggcacagtaaaaaaagttcattctgttgtcgaagcaataaaaatagcaaatgatgttgaagaaatactatttttaggcgatattttaacagcttttggagattggttaaatgaaaaagctaatctagtgccttccccttatgttgaagaatggtggatacaagagtttgatagggcagcaatgaaaaaaaccgattataaaatagaattcgatgtaatgaagccaagaaaactattcaaaatagaagggttggaaaatttgtctcaatatttaggaattcccaaagatagattagaagaaataattaggaaaccattctctaggaaaccaactattgatgaagcaataactattagtgaaaagcttggaattccattacatccagagtatactccattctgggttcatataacaaaagaagagctaataaaattaatagaagagcttaggaaagctaaaattcaaaataacaaaatatatttccatgaatcgcaaaaagagctaaaagcaatattagagaaactgtttattgaacattttagggaaggagagtacttttatataaacgaaagtatgacaaaatctttgttataccaattagataatctaaatttagaaaaggcaaaaaaagaattcgataatgctatagacgctttagatttggttaataggttatccccaatagagataagggatgttgccggagtatatgtagggtttagagcgggaagaccagaaaaagctaaaatgagagaaatgactggtaggccccatgggctattccctgttggagaagaaggtggaaaaatgcgtaatgttatagaagcctataacaaaggctatgttaaagcagaatttgctttgtattattgtaatcattgtaagcgctatactatttatagaaaatgtgaagtttgtggcaataaaactaaagaggtttatgtttgcaaagaaataataaatagactaaaaacctctctattcaaacaatataaggattggaaaaaagttgaagaagaaatagcttcccatctatgggcagaggccgtaacacattctaaaaataattgtagagagcctaaaagatatagtctaataaaactaaacataaagcattatgtagatagagctgttcaaaagttaaaactatttaatataccaaaattagttaaaggagttagaggtacatcaaataaagaccatatagttgaaaggctagaaaaagcctttttaaggtctgtaagtgatgtttatgtaaacaaagatggcactataagatatgatggtactcaaatacccttaacacattttaggccaaaagatttaattggtgttacaatagaaaaactaaaagaattgggttatacacatgacatatatggaaacccattggaaagggaagatcaaatattacaactaaaaccccaagatataatattaccctatggtatattagttaaatcccgtttaaataaaaacaaaatagtaagaacagatgcggcagaagcatttaagaaagtagcaaactttgttgacgaagaattaaagaggttatacaacttagaaccttattataacatagaaaaagccgaagacctaataggaaaaatagtttttggtattgctccccatacatctgcagctgtagtaggtagaataatagggtttaccccaatacaagggataattgcccacccgatatggcatgcgggccaaagaagaaattgcgatggagacgaaaccgcagtaatgcttgggttagatgcgttaatcaatttctctagagaatatttgcccgacaaaagaggggcaagaacaatggatgcacctttggtattaacattaaaattagagctaaaagctgtagacgatgaagtacatgatatggatattgtttataattatcctttggaattctattacgaaacattaaagggctctcccgcaaaggatgttaaaaaacaatgtggtatactaacattgggtgattttctaaaagaagaagacataagtaaaataccaataggctttacccatccaacaaaaagtattaggcttggtaataaggttagcctatacaaaaggctaaaaactatgcaacaaaaaactgaatggcaattaaaattggcagaaagaattagggcagtagatgaaaatattgttgcagaaatagttatagaaaaacatttcatgccagatataaagggtaatctaagagggtttagtagccaagtctttagatgcactaaatgtgacaccacatacgatagagtcccattaagtgggaaatgtccaaaatgtggaggcaatatagtatttactgtacacgaagggactataaagaaatatttgcctacttctctctatttagctaggaaatacaaaataaagaaattcacaaaacaaagtttattcttattagatagaagaatcaaacaaatattcgggggagaaaagaaaagcttggcagattttataaatagctaa

SEQ ID NO: 819 - protein, 1243 aa, Nanoarcheum equitans
MVYYDILAKELEKLYEIAEKARAQGYDPKDIVEIPLANNMGERVAHLISAIHEQLDVKKTAELILELEKQYGFLDWRVGLKLIDYALEGKLIPYDDILKRIDLGVRLALGYITMGVVSAPLEGLVELRIKKRKDGKPYLALYYAGPIRGAGGTAAAVSVLFADYARKKAGLYEYDPTKEEIERYKIEIDSYHNKVARLQYKPSDEEIEFLVKHIPVEINGDPTSDKEVPSYKNLERVETNRIRGGMCLVIAEGIAQKAKKIYGKITEWGKEFGLEHWEFLGEYLKLQKEIQAKLAAESGGEIEGKEIKRKITLFLDEIKKEEITVKYPTPAGKYLQEITAGRPIFSLPMAIGGFRLRYGRSFATGFATSGIHPATMFLTYGFLAIGTQMRGERPKKSTIVTPVTSLHPPIVKLKDGTVKKVHSVVEAIKIANDVEEILFLGDILTAFGDWLNEKANLVPSPYVEEWWIQEFDRAAMKKTDYKIEFDVMKPRKLFKIEGLENLSQYLGIPKDRLEEIIRKPFSRKPTIDEAITISEKLGIPLHPEYTPFWVHITKEELIKLIEELRKAKIQNNKIYFHESQKELKAILEKLFIEHFREGEYFYINESMTKSLLYQLDNLNLEKAKKEFDNAIDALDLVNRLSPIEIRDVAGVYVGFRAGRPEKAKMREMTGRPHGLFPVGEEGGKMRNVIEAYNKGYVKAEFALYYCNHCKRYTIYRKCEVCGNKTKEVYVCKEIINRLKTSLFKQYKDWKKVEEEIASHLWAEAVTHSKNNCREPKRYSLIKLNIKHYVDRAVQKLKLFNIPKLVKGVRGTSNKDHIVERLEKAFLRSVSDVYVNKDGTIRYDGTQIPLTHFRPKDLIGVTIEKLKELGYTHDIYGNPLEREDQILQLKPQDIILPYGILVKSRLNKNKIVRTDAAEAFKKVANFVDEELKRLYNLEPYYNIEKAEDLIGKIVFGIAPHTSAAVVGRIIGFTPIQGIIAHPIWHAGQRRNCDGDETAVMLGLDALINFSREYLPDKRGARTMDAPLVLTLKLELKAVDDEVHDMDIVYNYPLEFYYETLKGSPAKDVKKQCGILTLGDFLKEEDISKIPIGFTHPTKSIRLGNKVSLYKRLKTMQQKTEWQLKLAERIRAVDENIVAEIVIEKHFMPDIKGNLRGFSSQVFRCTKCDTTYDRVPLSGKCPKCGGNIVFTVHEGTIKKYLPTSLYLARKYKIKKFTKQSLFLLDRRIKQIFGGEKKSLADFINS

SEQ ID NO: 820 - DNA, 540 bp, Nanoarcheum equitans
atggtctccattagagaactaaaagaatatttagaacaggaaagtaaaagcaaaaagctaatcgaattagatcaaaattttttatacgatttagtctcaacgattaaaactataaaagaggacatgtctaaagttgattttgaaacccaacaggctttatccaaaaaatatggagaaataagatctttagcgcaaaaacttttcgtgaaaagaatcaaaaaaataatagaaactgctttatcttcagtaataacagaaacaaaagtagagattaatggattacctgaagaaaaacttttgtataacgaattatacgaagtattaagcaaatattggaaaacaataaccatgatactaaatggagaaaaagcagaacaaatagagatgcccgaaataatctatatagatactaatatagagaaattctattgggaggatggtaacttctatgggcctttcgaaaaaggagatattgcaatattggataaaaatttggctgaatatttagttaaaaattttaagaaggttagctatttataa

SEQ ID NO: 821 - protein, 179 aa, Nanoarcheum equitans
MVSIRELKEYLEQESKSKKLIELDQNFLYDLVSTIKTIKEDMSKVDFETQQALSKKYGEIRSLAQKLFVKRIKKIIETALSSVITETKVEINGLPEEKLLYNELYEVLSKYWKTITMILNGEKAEQIEMPEIIYIDTNIEKFYWEDGNFYGPFEKGDIAILDKNLAEYLVKNFKKVSYL

SEQ ID NO: 822 - DNA, 693 bp, Nanoarcheum equitans
atgaaagtccttaaattagaaggaattagaaaatcctataatgatttggtagttttggataatataaatttagatatagatgaaggagagttcgtttctataatggggccgagtggttctggaaaaaccacgctattaaatataatgggtttgttagataaaccggataaaggcaaaataataataaaaaacaaagatgttactaatatttatgatgataatattttgtcctacattagagggaaagaaataggttttgtttttcaacatagctatttaatacctgtattaacagctttggaaaatgttttgttaccatcaatatttattgggagtccaaataaagatagagctaaaaagttattggatttggtaggcctaaaaggttattataatcattatcccaaccaacttagcggaggacaacaacaaagagtggcaatagcgagagctttaatgaataacccatcaattattttagctgacgagcccacagcgagcttagatgtaaaaacagcaaaaactattgtcaacctattcaaagaactaaacgataaaggccatactatagttatggtaacccatgatccaaatatagcgaaatactcgaaaagaattgttgtattgtatggaggaaaaatattatcggacaatgcctctttagaggaagcgttgaaattgattgaacaatga

SEQ ID NO: 823 - protein, 230 aa, Nanoarcheum equitans
MKVLKLEGIRKSYNDLVVLDNINLDIDEGEFVSIMGPSGSGKTTLLNIMGLLDKPDKGKIIIKNKDVTNIYDDNILSYIRGKEIGFVFQHSYLIPVLTALENVLLPSIFIGSPNKDRAKKLLDLVGLKGYYNHYPNQLSGGQQQRVAIARALMNNPSIILADEPTASLDVKTAKTIVNLFKELNDKGHTIVMVTHDPNIAKYSKRIVVLYGGKILSDNASLEEALKLIEQ

SEQ ID NO: 824 - DNA, 654 bp, Nanoarcheum equitans
atgatatacttaattggtttgggcataagaaagggcgatatatcatatagagcaatagaattgttaaaaaatttggataaaatatatttagatagctataccgtttacataaatagctattacaaagattacataaaatggttagagaacattattgacaaaaaaataatttttgccgatagggctttggttgaagagcaattagaagaaattgctaaaaaagaagatgttgctttattaacgattggggatcccttgttcgccactactcatatatatcaattcaaagatttaataaaagatataatacatgcgccttcagttttgaattatatatataatttgggcctaagcccatataggtttggtagaataatatctattccccacccatctaaagggttatacgacatagaaagtaaaatagaggtaaatttaaaaaatgatttacatactttaattttgttagatacagatcccgttttagattacaaaactgcaataaaagtatataatttagacaaatattgcactatagcagtatctattggggaaaaaatagtctatggcaaagaaatagatgcgcctcccccacatgctttaataatacccgcaaaacttatgcattatgaaaaagatttcatccaatgttga

SEQ ID NO: 825 - protein, 217 aa, Nanoarcheum equitans
MIYLIGLGIRKGDISYRAIELLKNLDKIYLDSYTVYINSYYKDYIKWLENIIDKKIIFADRALVEEQLEEIAKKEDVALLTIGDPLFATTHIYQFKDLIKDIIHAPSVLNYIYNLGLSPYRFGRIISIPHPSKGLYDIESKIEVNLKNDLHTLILLDTDPVLDYKTAIKVYNLDKYCTIAVSIGEKIVYGKEIDAPPPHALIIPAKLMHYEKDFIQC

SEQ ID NO: 826 - DNA, 378 bp, Nanoarcheum equitans
atgaaaaagatttcatccaatgttgagagagaaatacaatctttaatatgggaaaagggttttgcttgcttaaggatagcaggctctggctcctctcgatatccagcggcagatttaatagccaaaataaaggacttatatattatagaggtaaaatatactcacaaagattatgtttatataaaagatgagcaattagagcaaattgaattgctatgcaaaaaatttgaagctaaacctttaatagtgataaagttttcccgaaaaggaatctattgtactacgaatttgcgaaataaatatactataaatgatggagatttagttaattttaaagaatggctatctgcagcgcctggtttcttcactaatcagtaa

SEQ ID NO: 827 - protein, 125 aa, Nanoarcheum equitans
MKKISSNVEREIQSLIWEKGFACLRIAGSGSSRYPAADLIAKIKDLYIIEVKYTHKDYVYIKDEQLEQIELLCKKFEAKPLIVIKFSRKGIYCTTNLRNKYTINDGDLVNFKEWLSAAPGFFTNQ

SEQ ID NO: 828 - DNA, 1302 bp, Nanoarcheum equitans
atgttctataatgctgtactagctagttggggagaaatattcttaaaaggggaaagaagcaaaaaaggtttgcttaaactattaattaaagatataaaaaggaaagttccctacgatgtgttaaaaatagataggggtttatttatattcaaaggagatgtaggagaaataataagaaaactaaagctcgttcctggaataaataaaatataccctgcattagaagtagaaaaagatttagaatcaataaaaaaatatgctttggaattggctaaaaggctaccaagaaaaactttcaaaataaaagttattagagcagataagaattttccttacaatagtttagagatagccaaaattgtcggttcttatatagaaaaaaatagtgataaaaaagttaatctaaaaaatcctgacaatataataagaataaacataagagataaagtttatatttattattcggaagaaaaaggtctaggaggtttgccctatggtagtgaaggcaaagctttgtctttattttctggggggtttgattccactttaacagctatatttgctatcaaaaggggggttataccaataatagtttattttaaccctttcgacgattttatagaaaaaactgtatatgaagtttatgaaaaaataaaagaattctccccagattcgatttttatttctataccatttagcgaagtttattaccaattattaatgaatgtggaagaaaaatacaggcaaatcttacttaagataataatgcataagactgctaaagctttggcaaaaaaattaggtttaaaatctatctttattggggaatctattgggcaaaaaagtactcaaaccctaaaaagcttagaaactattgatagcttaaccttagatagcataagtgtatttagacctatagcgggattagacaaagaagaagtaatagagtatataagagaattgggcttatatgattatgttattaaagttaaagagatgtgtgcattaggtaggaaaactgttatagaacctaaagaagagataataaaaaaatggttggacaaaattgacataaatatagatagcttaataaaagaagcgaaaactaatttgcctataaaaagttatgaagaggaattagattattgcgaaaaccccatatctatttggaaatttattagaactaagaaaggagattgcatctattgtaaagagggtactttagctttaaccttaaagaaagctttaaaaaagaggggtatagaaattaaagcaatgaagagtttgccgattactgattag

SEQ ID NO: 829 - protein, 433 aa, Nanoarcheum equitans
MFYNAVLASWGEIFLKGERSKKGLLKLLIKDIKRKVPYDVLKIDRGLFIFKGDVGEIIRKLKLVPGINKIYPALEVEKDLESIKKYALELAKRLPRKTFKIKVIRADKNFPYNSLEIAKIVGSYIEKNSDKKVNLKNPDNIIRINIRDKVYIYYSEEKGLGGLPYGSEGKALSLFSGGFDSTLTAIFAIKRGVIPIIVYFNPFDDFIEKTVYEVYEKIKEFSPDSIFISIPFSEVYYQLLMNVEEKYRQILLKIIMHKTAKALAKKLGLKSIFIGESIGQKSTQTLKSLETIDSLTLDSISVFRPIAGLDKEEVIEYIRELGLYDYVIKVKEMCALGRKTVIEPKEEIIKKWLDKIDINIDSLIKEAKTNLPIKSYEEELDYCENPISIWKFIRTKKGDCIYCKEGTLALTLKKALKKRGIEIKAMKSLPITD

SEQ ID NO: 830 - DNA, 2145 bp, Nanoarcheum equitans
gtgttaccatataaaatagaggaaacagaggataaaaaaatagtaattgttgatgccaacaattataatgacataccattaatagaagacaaccccaatataatggattttactataaagctattaacgcaaattcccgatgtttattcgataatatttgaacaaggtgatagttacgaatatgattataaccaattagcgttgttaaaagagatcgcccaaatatatagtgatttgtatatgtttataccaaggcccacgggtataccatatatagataaatattttgaacaataccatactataataacattgttacctagagatccaataagctcttatgtttctttgaaaaggttagagaaaaaaatagaaatagagatcgaaaaaactaatagtaaagaattggttaacctattatctatagtcaaaaaagccattaaatctttagacaatacaaaaatgatttctttagtaaaggacaaacttattggataccaaataggggatagaactatatatagggaattgttttacccattaattaagccaagctttatgtatgttaagctaataacccaaatcccgtctaaatcaaaaattatagatttttataaaactaatgaagcaaacatatatattgttgataccggtattaaattgaaataccatttgatccctatagagttttctttgtctcccgaagagtatgatttgctttccaaagctagataccaattgtctcgctataatccgttgcagtccaatttaatagaaccatcaaatttaagagatgttttttaccaattaggaaaagataccttaattaggctagcccaatattataggataaacctaactaaagataaattggaaaaactctcctctatactattaaagtacactgcaggcttagggattattgaaacaattttagaggataaaaatattgaggacatatctattaaccctccaacgggggaaaaccctatatttgtctaccatacagagtatggttatttggaatccaacataaaactaactcctatagaagcagaaatattagttacaaggctaaaactttattcaggcagaccattggatgaagcaaacccaatattagatacagagttaaaaataaaaaacaatagaattagggttgcggcagtaacaaaacctttatctccatatggctatgggttttccattagaaggcatagagataaaccatggactttgccattattaataaaatatgaaatgctggattaccaatctgcagccctattaagtttttttgtagaatttggtagaaccatattaattgctggcccaagaggggcaggcaaaacctctctattaacggctttgttattggaaataccattaagtactagaataataacaatagaagatgtattagagataccaacagaatatttgcaaagaataggttataatgtattatctctaaaagtaaaatctccattatctatagaatcaaaagaattgccagcagagtatggaattagggcttcccttagattgggcgattcagcattagttttgggagaagttagatctaaggaagcaatagctttgtttgaagcgatgagggttggagctttggcccatagcgttttaggcacaatccatgctgaaaccccttatggtttgtatgatagagttgttaatgatttaggagtgcctaaaacatcatttaaagcagtagatataattgttatgttaaacaaaataattgatgggcttaaacttaaaagaaaactagtacaaattacagaattaaccaaatattgggagaaagacccattggaagaaaatgcctttatagatttggcaatatacgattctaaaagcgacaaaacaataataaacgatttgtccaatagttataccttaagagagataataaaaagagtaagacatttcaaagattttgtctcgctattgtcttatttaaaagctaaagaatggcaattatctttgctagttaaatataatattttagaaggcaaagaagtagtaatagcaaatgaattgtttagaaagcattatatcgatggaaacctaaaaatgtacgagcaaactttaaagaagatgaaaaataaaaaagatgttctataa

SEQ ID NO: 831 - protein, 714 aa, Nanoarcheum equitans
MLPYKIEETEDKKIVIVDANNYNDIPLIEDNPNIMDFTIKLLTQIPDVYSIIFEQGDSYEYDYNQLALLKEIAQIYSDLYMFIPRPTGIPYIDKYFEQYHTIITLLPRDPISSYVSLKRLEKKIEIEIEKTNSKELVNLLSIVKKAIKSLDNTKMISLVKDKLIGYQIGDRTIYRELFYPLIKPSFMYVKLITQIPSKSKIIDFYKTNEANIYIVDTGIKLKYHLIPIEFSLSPEEYDLLSKARYQLSRYNPLQSNLIEPSNLRDVFYQLGKDTLIRLAQYYRINLTKDKLEKLSSILLKYTAGLGIIETILEDKNIEDISINPPTGENPIFVYHTEYGYLESNIKLTPIEAEILVTRLKLYSGRPLDEANPILDTELKIKNNRIRVAAVTKPLSPYGYGFSIRRHRDKPWTLPLLIKYEMLDYQSAALLSFFVEFGRTILIAGPRGAGKTSLLTALLLEIPLSTRIITIEDVLEIPTEYLQRIGYNVLSLKVKSPLSIESKELPAEYGIRASLRLGDSALVLGEVRSKEAIALFEAMRVGALAHSVLGTIHAETPYGLYDRVVNDLGVPKTSFKAVDIIVMLNKIIDGLKLKRKLVQITELTKYWEKDPLEENAFIDLAIYDSKSDKTIINDLSNSYTLREIIKRVRHFKDFVSLLSYLKAKEWQLSLLVKYNILEGKEVVIANELFRKHYIDGNLKMYEQTLKKMKNKKDVL

SEQ ID NO: 832 - DNA, 978 bp, Nanoarcheum equitans
ttgttatttttagctaatcctatgtctaaggatgatattagatctttacctggggtaggcccaaaaactgctgaaaaactaattagtgctggttacgattcattaataaaaattgcttccgcgagtgtagaagaactaatggaagctgcagatattggggaagctacagccagaaaaattattgaagctgcgatggagagattaggattattggaatttaaaacagcagaagaggtattagaggaaaggcaaaaaactgctagaataacgactatgtccaaaaacttagattccctattggggggaggtatagaaaccgcagcattaacagagttttatggagaatatggttctggtaaaacacaagtaggccaccaattagccgttgatgtgcaattacccccagaacaaggaggattagaagggaaagccgtatatatagatacagaaggtacatttaggccagaaagaataaaacagatggccgaagcattagatttagatccaaagaaagctttaaaaaatgtgtatcatatgaaagtatttaacacagaccaccaaatgcttgctgcgagaaaagcagaagagctaataagaaaaggagaaccaataaaattaattgtagtagattctttaacagctttgtttagagctgaatatacaggaagaggacagctagcagaaaggcaacacaaattaggaaggcatgtacatgatttattaaggatagccgaattatataatgtggcaatatatgtaacaaaccaagtaatggctaaaccagattcttttattccaggcctagattcagtacaagccgttggagggcatgtattagcacatgcatcaacctatagagtattcttaagaaagggtaaaaaaggtataagaattgccagattagtagattcgccccacttaccagagagagaaacaacattcgttattactgaagaaggtataagagacccagagtga

SEQ ID NO: 833 - protein, 325 aa, Nanoarcheum equitans
MLFLANPMSKDDIRSLPGVGPKTAEKLISAGYDSLIKIASASVEELMEAADIGEATARKIIEAAMERLGLLEFKTAEEVLEERQKTARITTMSKNLDSLLGGGIETAALTEFYGEYGSGKTQVGHQLAVDVQLPPEQGGLEGKAVYIDTEGTFRPERIKQMAEALDLDPKKALKNVYHMKVFNTDHQMLAARKAEELIRKGEPIKLIVVDSLTALFRAEYTGRGQLAERQHKLGRHVHDLLRIAELYNVAIYVTNQVMAKPDSFIPGLDSVQAVGGHVLAHASTYRVFLRKGKKGIRIARLVDSPHLPERETTFVITEEGIRDPE

SEQ ID NO: 834 - DNA, 1125 bp, Nanoarcheum equitans
gtgtccctattgccagagaaaattttgcaggaatttgaagagatggcaaaaaaatataaaattaggggaaaaaagaaggaacaactgttaaaaaagttagaagagaaatatttgaattctctaattgatcctcaagagcccattggaataattactgcacaatcctttggagaacctgcaactcagatgctattaaacgctttccattttgcgggggtatcagaattacaattggttacaggtttacccaggttgatagaaatattaaatgcgaagaaaaaacctactataccttcaatgaccatatatttagaaaaaaatgatgaaaaattagcagaagagttagtaaacaaactaattgaagtaaagctatcggatattgctaaatcaatatcgatcgatgttattaacaaaagaattataatagaattagatcaacaattagttaaagaaaaagacataacaaaaaaagatttagaaaaagcgttcaaatctgcaaagcttaaagccaaaattgaaaataatactattactatagaggcaggaaacaaaaggcccaaagagttgtatctgttaaaaaacaaaataaaagatttacatataaaaggggttaaaggtatcaaatacgcaatgattactagggaaaatgatgaattagtaataaaaaccttcggttccaatttaaaagaggtattaaaaatgaaaggtatagacaaaacccgtactactactaatgatatacacgaaattgcaaaagttttaggaatagatgcggctagagaagcaataatagaggaaatacaaaaagtattggaagaacaaggtttagaaatagatgttagatatctgttattaattgctgatgtaatgacatactatggagaagtattgggatttaccaggcatgggctaatggagaggaaaccatccccactagagagagctacattcgaagtaccattcaaaaacctggcagatgctgctttgctaggagaaaaagatgatctaagggctgtaatagtaaatgtcctaattaaccaacccgcccccatgggaacaggtagaattaaattagtttttgacgaaaagaagttcgaagaactaaagaaaaaattaggcaaataa

SEQ ID NO: 835 - protein, 374 aa, Nanoarcheum equitans
MSLLPEKILQEFEEMAKKYKIRGKKKEQLLKKLEEKYLNSLIDPQEPIGIITAQSFGEPATQMLLNAFHFAGVSELQLVTGLPRLIEILNAKKKPTIPSMTIYLEKNDEKLAEELVNKLIEVKLSDIAKSISIDVINKRIIIELDQQLVKEKDITKKDLEKAFKSAKLKAKIENNTITIEAGNKRPKELYLLKNKIKDLHIKGVKGIKYAMITRENDELVIKTFGSNLKEVLKMKGIDKTRTTTNDIHEIAKVLGIDAAREAIIEEIQKVLEEQGLEIDVRYLLLIADVMTYYGEVLGFTRHGLMERKPSPLERATFEVPFKNLADAALLGEKDDLRAVIVNVLINQPAPMGTGRIKLVFDEKKFEELKKKLGK

SEQ ID NO: 836 - DNA, 315 bp, Nanoarcheum equitans
atggtggggctaacgaaggttttgaagaataaaccaaaagggaaaattcttagaaagctaaggagccaatattatgatattaagcctacaataaacattggaaaatccggaatcgataaagttatagagcaaatagagaaccaattaaaggttagagaagtagtaaaagtaactataaacaaaaacatattaagaatggaagatagatttaacatagcaaaacaactgcaagaaaaattgaaaagcggtgtaataatcgatataagaggaagaaaaattttaatcgctagaaaaagtttagtgtatccaagttga

SEQ ID NO: 837 - protein, 104 aa, Nanoarcheum equitans
MVGLTKVLKNKPKGKILRKLRSQYYDIKPTINIGKSGIDKVIEQIENQLKVREVVKVTINKNILRMEDRFNIAKQLQEKLKSGVIIDIRGRKILIARKSLVYPS

SEQ ID NO: 838 - DNA, 456 bp, Nanoarcheum equitans
atgtctttactattaactaatagttataaggctatttataaaagtaacaaatataataacatgtttgggaaaaagtccatgaaagaagtaataagagaaaggttaaaaagtgttgagaaaaatgaagtattcgataggtttgtaaaggtggatgaaacaaaaagagaggatgctcgctcttattatgaagaagtagtagagaaattcagaaaacagctagatgaaaaagattatgaaactattgaggaaatggttagggattatttaaccttttacaaaaaagcagtagatcatactaatttcgtatttaattctgttatcgaggatgcccaatatatagggagagagctattagaagttaccgataattttgatgaatttgataatgcggtaaggcaatatataaaagcaaaagaatccgtatatggtggggctaacgaaggttttgaagaataa

SEQ ID NO: 839 - protein, 151 aa, Nanoarcheum equitans
MSLLLTNSYKAIYKSNKYNNMFGKKSMKEVIRERLKSVEKNEVFDRFVKVDETKREDARSYYEEVVEKFRKQLDEKDYETIEEMVRDYLTFYKKAVDHTNFVFNSVIEDAQYIGRELLEVTDNFDEFDNAVRQYIKAKESVYGGANEGFEE

SEQ ID NO: 840 - DNA, 1293 bp, Nanoarcheum equitans
atgccatctctgtgggattacctaaataaagataaaaaacctgttataaaaaaggttgaacctccaaaaaagaaagaaataaaaagagacattccattgttcataaaatataggccaaaaactttagatgaagtggagaaccaagagcaagcgaaacaaattttaagagattatgtaataaactataagaaaaaatacaaaggaaaagctttattattgtatggcccaccagggacaggcaaaacttcctctgtatacgctttagccaatgaattaggctatgaagtattggaagttaatgccagcgatgaaagagatgctatacatattcatcatatagtaggggaagcatcaaaagggaaacctttgtttcataaaggtagaataattttggttgatgaagtagacgggttaagtggtaaagaagacagagggggagtaggtgcattagttaatataataaaacaatcatcatggccaataatttgtactgccaatgatccgtgggatcagaaattgaaaaaactaagggaaatctctataatggttgaattcaaaaggctatcaccaaaacatgtatataatgtgctaaaaaagatagtaactaatgagaaaataaaaattagtgacaaaattctatgggatatagcctataaaagcgggggcgatttaagagcagcaataaatgatttggaaacaataataaaatctggaataattgatgaaaactttgtaaaagctttaggaaatagagaacaagaaatagatattttcaaagcattaggtataatgttcaaaaccgaaaacctcgccacagcagtttcagcttttaacaatgttgatttggaatttgacgaaatattcccttggttagaggaaaatatacctgtggaatataaaaggttagacgatatttatagggcatattattggttaggaaaagcagacatatttagaaaaagaataataaaaacacaacattggagattgttggtttatgcccaaatcgatgcttatggggggatagctttggctaaaaacaaaaaatatcctggttttactagataccaaccgccgaaaaggttaaaacttctagctcaaatgaaagaaaagctagaaaaacttagagagcatgtatctaaattgagggaaaaactacatatgagcaaaagagatataataaaatactatgttagttttgcgttaaaactaaaaaacctaaacaaaacagtagcagacaagttcttaaaagcgattgggttatcattaaaagaaattgaagaaattcgctag

SEQ ID NO: 841 - protein, 430 aa, Nanoarcheum equitans
MPSLWDYLNKDKKPVIKKVEPPKKKEIKRDIPLFIKYRPKTLDEVENQEQAKQILRDYVINYKKKYKGKALLLYGPPGTGKTSSVYALANELGYEVLEVNASDERDAIHIHHIVGEASKGKPLFHKGRIILVDEVDGLSGKEDRGGVGALVNIIKQSSWPIICTANDPWDQKLKKLREISIMVEFKRLSPKHVYNVLKKIVTNEKIKISDKILWDIAYKSGGDLRAAINDLETIIKSGIIDENFVKALGNREQEIDIFKALGIMFKTENLATAVSAFNNVDLEFDEIFPWLEENIPVEYKRLDDIYRAYYWLGKADIFRKRIIKTQHWRLLVYAQIDAYGGIALAKNKKYPGFTRYQPPKRLKLLAQMKEKLEKLREHVSKLREKLHMSKRDIIKYYVSFALKLKNLNKTVADKFLKAIGLSLKEIEEIR

SEQ ID NO: 842 - DNA, 597 bp, Nanoarcheum equitans
ttgaagaaattcgctagatttataggaatagacgatggttatttcgttagaaatgtacataaaaaaacaaaactaataggagcaatcacaaagcatacgatattggatggagtattgtctagagaaataacaatagatggtgacgatgttagcgaaaaaataattgatatgataaaaaatagtaatcattattaccaaattagggggataattttgtatggcataacctttgccggatttaatatagcggacgtggaattaatatacaaaaatttgggtttacctataataatagtaatggagcgccctccgaaagatatattctataaagctatagaaaaatacaaacctaatgggatagaattaataaaaaaggctggccccatatataaaacaaaaactcctttcggttatacatattaccaagtttatggtatcgacaaagacactgcttctaatataataaataatttagcaatagtatcaaaaataccagagcctgctagggttgctcatatgattgctagaggtgtaactaaaggggattcatcaaaaccacgggccggcggggattcgaaccccggacctgcgggttaa

SEQ ID NO: 843 - protein, 198 aa, Nanoarcheum equitans
MKKFARFIGIDDGYFVRNVHKKTKLIGAITKHTILDGVLSREITIDGDDVSEKIIDMIKNSNHYYQIRGIILYGITFAGFNIADVELIYKNLGLPIIIVMERPPKDIFYKAIEKYKPNGIELIKKAGPIYKTKTPFGYTYYQVYGIDKDTASNIINNLAIVSKIPEPARVAHMIARGVTKGDSSKPRAGGDSNPGPAG

SEQ ID NO: 844 - DNA, 966 bp, Nanoarcheum equitans
atgccacaacatggtaggcatgcccctagaaggggttctatgggattttggcctagaaaaagggcttctcgtatttatcctagaataaaaacttggcctaaaatagaggaaataaaaccattagcttttgcagcttataaagtagggatgactcatacaatattaaacataaatggggaaagagtttttactccagttaccgttttagaagctcctgaattattagttattggagcaaaagcatataaaaaggagaacggtgcattaaaagaaataagctctttatattttaatgacttaccccaatatgtctttagaaaaatcccaaaactaaagaattataattttgaagaaaagaaagaacaattcctatctaaagcagacaatgctgatgaagtaaaaataatagtttctactcaaccatggaaaataaagctaaagaaaaccccagagatatttgacataccaattggaggaagcgatgtaaataaaaaattagaatatgctttatctttattaggaaaagagttatctattaatgatgtgtttaaagaggggcaatatgtagatgttattgcagttacaaagggcaagggcttccaaggtgtaataaaaagattccatgtgcatagaaggcaacacaaatctgaaaaaggtgttagaaaagttggagctattggttctagaggacccggtagaatatttccaacagttccaatgcccggccaaatgggataccatagaagaacagagtataataaactaatcataaaaataggagaaccactaaatgttgaaggcggttgggtgaggtatggccaagtaattgggcctacaatattattaaaaggctctgttccagggccaagaaaaagactaataatccttagagaagctataagacctccaagaaaacaagagaaagttgaagggatagaatatataagtttgtctcccaaaaactaa

SEQ ID NO: 845 - protein, 321 aa, Nanoarcheum equitans
MPQHGRHAPRRGSMGFWPRKRASRIYPRIKTWPKIEEIKPLAFAAYKVGMTHTILNINGERVFTPVTVLEAPELLVIGAKAYKKENGALKEISSLYFNDLPQYVFRKIPKLKNYNFEEKKEQFLSKADNADEVKIIVSTQPWKIKLKKTPEIFDIPIGGSDVNKKLEYALSLLGKELSINDVFKEGQYVDVIAVTKGKGFQGVIKRFHVHRRQHKSEKGVRKVGAIGSRGPGRIFPTVPMPGQMGYHRRTEYNKLIIKIGEPLNVEGGWVRYGQVIGPTILLKGSVPGPRKRLIILREAIRPPRKQEKVEGIEYISLSPKN

SEQ ID NO: 846 - DNA, 591 bp, Nanoarcheum equitans
atgaaagaattagaaaagcttaaaaaattcttcaattggcttttatttagtaatgatcccaaaagttatttagcttttattgtattcgtttttgtattttataattttatttttactcctatactaaaatttataaccaaatctgaaaaccctatattggttatattaactccatctatgcagcataacaattttaacttattatggtattgcaaatattggaatttatccttaatcgaatgtgaaaaaaagtttaaacaattaccatttagccaaggtataaatgttggtgacattgttatttccacttctaaagaagatgctaaagttggcgatgtattagtaatgaaagcaaatttgaaatacccattagtacatagggttataggcttacgatgtgggaacaaaacaataaaagattttgtttatatcaaagattataaaaattgcactttaatcactaagggcgataataatcccactatagatccttttgtaataacgtacaaagaagtggaagggaaagttagcttcgttattccttatttgggaatacccagagttattttgtataaaatattaagaatttag

SEQ ID NO: 847 - protein, 196 aa, Nanoarcheum equitans
MKELEKLKKFFNWLLFSNDPKSYLAFIVFVFVFYNFIFTPILKFITKSENPILVILTPSMQHNNFNLLWYCKYWNLSLIECEKKFKQLPFSQGINVGDIVISTSKEDAKVGDVLVMKANLKYPLVHRVIGLRCGNKTIKDFVYIKDYKNCTLITKGDNNPTIDPFVITYKEVEGKVSFVIPYLGIPRVILYKILRI

SEQ ID NO: 848 - DNA, 1728 bp, Nanoarcheum equitans
atgaaaatctattataataatgtttgccccaattgttctgggagaatatctaatgaaagattaattaagggtttgccatgtgaaaacgattacccttatgaggaaggcacaattgaacaagtttacgaatatctaaaggaaaacaataaactaaaagattgggccaatatttataacatagaaaaagccaaaaaagaatttgaagaattcttttacaaagctgtaaacaataaaccttggtctgcacaaagagcatggttcattagagcttataagggatattctttttctataatagcccctactggaatgggaaaaaccactttcgctttagtaaatgccctatattggggtaaaaaaggtaaaaaggtatatattatagtgccaactagaactttggttaaacaattatatgaaaagataaatgtttttgccgagagggttgggtttgataatattattgtggcatactatggaaataacaagcaaaagaaagaagcaaaagagctaatcaaagatggggcattttctatactaataacatcgaaccaattcttaagcaggaattttgatttgctaaaaaacaattatttcgatataatttttgccgatgatgtagattctataatgaaaagcagtaaaaatatcgatcgcattttatatctattaggatttagtgaaactacaatagaaaaagcgatgcaattaataaagctaaaaatttcaggaaaagacttagaaaaaataagaaaaatggaagaacaattaaaggaattagttagaaaagaacaaagaggtatattaatagcggcatctgcaactggttctatgagagggctaagggtaaaactatttagagaactattaggtttcgaagttggagctgctaaaacaacaataagaaacataattgatgtttatacagagatgagagactataaaaaacaaactttagaattaattaaaaaattgggaaacggtggtttggtttttgtaccaacagattatggtattgaaaaagcagaagaaatagcccaatatttaaaagaaaacaacataaaagcagaagcattttactcaggtaaatctatagaattattagacaaatatgccaacaaagaattagatgtattagtaggggtagctcattattatgggttaatcgttagaggtatagatttgccccatgtagttaaatatgccatatttgttggcatcccaaggtttaggtttagcgcaaaagagaaagaaacaaaaataggaagaatattgttattagcatcaacattatctgactacgctgatgaagagtttaagaaaaaattaaatactacctataatatgataaaaagggtttctactggtgcactaaagatggttgaagaagctatagaacaaaacaaagagttggatggctttttagaagagttaaggaaaaatattatttatctaagggacaaatctttcgaattaattaatagggaagacataattaaaaaattggaagaaaatccctttattgctttagagagaggagatggtattaacattctaataccagatgttaaaacctacatacaagcctctggtagaacatctcgtatgtatccgggagggattactaaaggtttatctataattctaagcgataatgaaaaactattgagagcattagagtttaagcttaaactattaggaatagatctgcatccaggctcttcatcataa

SEQ ID NO: 849 - protein, 575 aa, Nanoarcheum equitans
MKIYYNNVCPNCSGRISNERLIKGLPCENDYPYEEGTIEQVYEYLKENNKLKDWANIYNIEKAKKEFEEFFYKAVNNKPWSAQRAWFIRAYKGYSFSIIAPTGMGKTTFALVNALYWGKKGKKVYIIVPTRTLVKQLYEKINVFAERVGFDNIIVAYYGNNKQKKEAKELIKDGAFSILITSNQFLSRNFDLLKNNYFDIIFADDVDSIMKSSKNIDRILYLLGFSETTIEKAMQLIKLKISGKDLEKIRKMEEQLKELVRKEQRGILIAASATGSMRGLRVKLFRELLGFEVGAAKTTIRNIIDVYTEMRDYKKQTLELIKKLGNGGLVFVPTDYGIEKAEEIAQYLKENNIKAEAFYSGKSIELLDKYANKELDVLVGVAHYYGLIVRGIDLPHVVKYAIFVGIPRFRFSAKEKETKIGRILLLASTLSDYADEEFKKKLNTTYNMIKRVSTGALKMVEEAIEQNKELDGFLEELRKNIIYLRDKSFELINREDIIKKLEENPFIALERGDGINILIPDVKTYIQASGRTSRMYPGGITKGLSIILSDNEKLLRALEFKLKLLGIDLHPGSSS

SEQ ID NO: 850 - DNA, 723 bp, Nanoarcheum equitans
gtgagaggtctaattatagggtacgaccctggggaatacagcgctatagcgatatttgacttaaaaggaaacctattatataagatatctaaaaaggatttcagagaggaagaaataatttcagtaatccataggtatgggaaacctttagttattgctacagacaaaaaaattatccctaaagctgtagaaaggttagccatgaaattaaaaagcaaaatattctctccaaaggacgatttaccagtatcattaaaaaaagaattagcaaaagattatagccctaatgacaaccacgaaagagatgcaattgcctcagcagtattcgctttgaactattatagcccattaatcaaaaagatagagaaaaaactggaagagctaactgtagatagtatatttgaaaaaataataaaaaatggcatttccattaccgatgttctggatagcgaatttaaaatagaagagaaaaaagaaattaaaaagaaatcgcttcctaccccgaattgctcttcaataattgaggagtataagcaaaaaatcgattttctaatagaggaaaacatggcattaagaaaaaagatttcccagctattagaaatgcaaaagcttaccataacaattaaaatagaaactgagagaaaagaagaaaaagaagaaatagatattaagaaaatcctagagcaatatagagaaaaaaggataaaagaactttacagctaa

SEQ ID NO: 851 - protein, 240 aa, Nanoarcheum equitans
MRGLIIGYDPGEYSAIAIFDLKGNLLYKISKKDFREEEIISVIHRYGKPLVIATDKKIIPKAVERLAMKLKSKIFSPKDDLPVSLKKELAKDYSPNDNHERDAIASAVFALNYYSPLIKKIEKKLEELTVDSIFEKIIKNGISITDVLDSEFKIEEKKEIKKKSLPTPNCSSIIEEYKQKIDFLIEENMALRKKISQLLEMQKLTITIKIETERKEEKEEIDIKKILEQYREKRIKELYS

SEQ ID NO: 852 - DNA, 1398 bp, Nanoarcheum equitans
atgattaagctaagagatataccattaatagcttatatagttgctatcgcttttgggttaatatatctagctctcccttcaaaggtttatgttaaatataataacaaattatacaaaccattggaaataaaagaccattacgcaaccattttattaaataatagcgtaaaaacaataaaaaatccagaggttgtttatgaaagcaaaataaaatttggtatcgatattgtaggagggaaaagggttatattgtatgttaatggcactaaagaagatgtagatgcggtatatacagttttggaagcgagattaaatagcttaggaataagcgatgtaagaatatacaagagcggtaattatattattatagagttgcctaccgaattagaggataaattaaaatctatattaagagaaggtaaatttgaagctaaaattgataacacaacagtttataccgggaaagacataataagggtatgtttatccccgagctgtagtggggtagatctaaaaacttgtaagccttcaaaagaaggatgggtatgccaatataggtttgctgtatggattgataaagatgcagcaaaaagattcgctttattaactaaaaatttatctatagttgagaaaaatggtacagtaacattaaataaaacaatagacttctatttggacaacaaactaataactaagcttaatatagatccttctttaaaaggaaaagaagcgactgtgttctctattactgggtttggagtaggagaaacaaagatcgatgcgataaaaaatgcctacggaagaatgaaatatttacaaaccatattattaagtgggtctttccctgtaaaacctgaaatagttagtgaagaaaatataataccgagtgcgggccaatcctttctaaaaaatgtgttacaagatttagctatagctctaatagcagttatagcatttatattagttagatacgccctagtatataaagacttaattgtttctattattatagcaattctaatgggaatagcattattatctgaaatatttttgattgttgttgttgcttctctcataaattgggttttagatatagcatctatagcaggtattttattaactgtcggtactggagtagattatctaattatttctacggatgaattacttagacataaaaagaccggtataaagaaggcattacaatttatagttagagcattcgttactacaggtttagcattaatagcattggcctttgctgctgcatcgttaatgaaaggttttgcattaacaacattaataggtttaataattggggcatttataacgaggcctgcatatattagagcattagaaagggtattagaatttttaaattctcataaaaaacattaa

SEQ ID NO: 853 - protein, 465 aa, Nanoarcheum equitans
MIKLRDIPLIAYIVAIAFGLIYLALPSKVYVKYNNKLYKPLEIKDHYATILLNNSVKTIKNPEVVYESKIKFGIDIVGGKRVILYVNGTKEDVDAVYTVLEARLNSLGISDVRIYKSGNYIIIELPTELEDKLKSILREGKFEAKIDNTTVYTGKDIIRVCLSPSCSGVDLKTCKPSKEGWVCQYRFAVWIDKDAAKRFALLTKNLSIVEKNGTVTLNKTIDFYLDNKLITKLNIDPSLKGKEATVFSITGFGVGETKIDAIKNAYGRMKYLQTILLSGSFPVKPEIVSEENIIPSAGQSFLKNVLQDLAIALIAVIAFILVRYALVYKDLIVSIIIAILMGIALLSEIFLIVVVASLINWVLDIASIAGILLTVGTGVDYLIISTDELLRHKKTGIKKALQFIVRAFVTTGLALIALAFAAASLMKGFALTTLIGLIIGAFITRPAYIRALERVLEFLNSHKKH

SEQ ID NO: 854 - DNA, 756 bp, Nanoarcheum equitans
atgaaaaagaaattgataggactagcttttagcctatctatattattatttagcatatatgttcttgtaacttctccctcgcctattaaaaaagatgtttccttagcagggggtgtagaattctatattccaaaaaaccaaacattaaatttaacggaattcaaaaatgcaataataaaggaaacagaccaatattatataatagatgtaccttatgaagaggcaaacaaaatcaaatctaaatacaatgtaagctatagggaattcaaacctacagtggcatccaacttttataaatctctaattagtgcttttatattttcatttttggcagtaggtgtttctttgttctttttcttcaaaaacccattgattccggcattaacgatattggctttagtatctaatgttatagatactttagcctttctaaatttaataggatttaaattttctatagcctctttggccagtctatttatgtttgtaggttattctgtggatacaaacatattgctatcggaaaaagtattagaagaaggtaattacaaagaagctttaattactgggttgtccttaacattaacaaccataatagctttgatagtaatattattattctcgcaaaacgaaatactaaaaagtatggccttagtattattagtagggctaacattcgatataataaatacctggatccaaaatggctctttgttgctattgcttaataaagaacaaaacaaaaagaaccaatga

SEQ ID NO: 855 - protein, 251 aa, Nanoarcheum equitans
  signal (1)..(23)
MKKKLIGLAFSLSILLFSIYVLVTSPSPIKKDVSLAGGVEFYIPKNQTLNLTEFKNAIIKETDQYYIIDVPYEEANKIKSKYNVSYREFKPTVASNFYKSLISAFIFSFLAVGVSLFFFFKNPLIPALTILALVSNVIDTLAFLNLIGFKFSIASLASLFMFVGYSVDTNILLSEKVLEEGNYKEALITGLSLTLTTIIALIVILLFSQNEILKSMALVLLVGLTFDIINTWIQNGSLLLLLNKEQNKKNQ

SEQ ID NO: 856 - DNA, 999 bp, Nanoarcheum equitans
atgaaaaaatttcaatctatagaattaagagttttgctcgaagaaaaccctatcgagggttatatagaaaaaatattcttttgcgataacgatttggttatagcttattctcataaaggtaaaagatatctaatagtaaaacctgggttagttttttatggagaaaccgagattatgtgtaacaaaaagaaaactagattctctttagtcttagaaaaatatttggagcacaaaaaaatattgaatgccaaaataataaatagtgaaagactattattgatagaattccaggactataatttatatatggagttttaccctcctggaattatagtattaactgacaaaaacaatacaatattggaaactaatataacgaaaaactttggatggcgtgttatagaaaagggcaaaccctatatttataggcaatccccaaacccttttgatatcgaatccttctataagctaaaagagagtgataaaaaagatttagttagagctttagccatagatttaggtttcggtaaagtttatgctaacgaattgttattaagaacaaacatagaaaataaaagccctaaacttttaaccgataaggaaatagagcttttgtataatagttttattgaattatataatgataggaaaccagcaatagttaataacgatgtggtgccttttaatctattatattataaggattatgaaaaaatttattttccaacctatacacaagcagtaaaggaatttctaaaagagaaagaagagacaaaaattaaacatatagaagaaacaatcaaaaaattggaggagctttacaattattataaggagattggcgataaactaatgcaaaaccagtattatttagagcaactaaggcaaaacataattattgcagcaaaacaatatggttgggaaaaagtgaaaaaatatttagaaagtaggggtattattgttaacgaaaaagaaggttattttgaaatagacttatga

SEQ ID NO: 857 - protein, 332 aa, Nanoarcheum equitans
MKKFQSIELRVLLEENPIEGYIEKIFFCDNDLVIAYSHKGKRYLIVKPGLVFYGETEIMCNKKKTRFSLVLEKYLEHKKILNAKIINSERLLLIEFQDYNLYMEFYPPGIIVLTDKNNTILETNITKNFGWRVIEKGKPYIYRQSPNPFDIESFYKLKESDKKDLVRALAIDLGFGKVYANELLLRTNIENKSPKLLTDKEIELLYNSFIELYNDRKPAIVNNDVVPFNLLYYKDYEKIYFPTYTQAVKEFLKEKEETKIKHIEETIKKLEELYNYYKEIGDKLMQNQYYLEQLRQNIIIAAKQYGWEKVKKYLESRGIIVNEKEGYFEIDL

SEQ ID NO: 858 - DNA, 888 bp, Nanoarcheum equitans
atgaagggcatagtattaaaaggaccagattattatctatcttatttcgaactaaaaagggttgctaaagcatataatgataaaatagaaagagtatctaaaaagttggttttagtaaatgatgggcaatacttcgatagactgggcttatcaaaatatttgttcgaagtaaaaataatagaagaaccagacagattttatttagataaaccgataaaccctataataataaaagagcaaaattataatatatctaatagaattaaaatggattttaaaggggaaaaatgggttattgttaaatccgacaaagtttatgccggtcccctattgaaaataaatcgaattccaaaggagcgcttacctcataataaaccatgtttccatccttcatcgataataccaactttggctaaagttcttataaacttaactggtttaaaagaaggaacaatttatgatcctttttgcggtattggtggtattctaatagaagcagcattgatgggtttccaagttaaaggtagtgatatagatgaaaaaatgttggaatgtgcgaaacaaaaccttctttattatgggataaaagaattcgaattagctaaatgtgatgctagagacttatgtttagatggagatgccatagttacagaccccccatatgggaggtatagcaaagtgtatggtaatattttagaactatacaaaggttttttgagcaaagcgatagagaaaaatataaatatagtctctatgctatatccagaatttttaaatcctgaattgtttgtacctaagggatataaaatactgttagatcggccatgggtttctccagggataagaaggcactttttattacttgaaaggagaaacaaaaacgaataa

SEQ ID NO: 859 - protein, 295 aa, Nanoarcheum equitans
MKGIVLKGPDYYLSYFELKRVAKAYNDKIERVSKKLVLVNDGQYFDRLGLSKYLFEVKIIEEPDRFYLDKPINPIIIKEQNYNISNRIKMDFKGEKWVIVKSDKVYAGPLLKINRIPKERLPHNKPCFHPSSIIPTLAKVLINLTGLKEGTIYDPFCGIGGILIEAALMGFQVKGSDIDEKMLECAKQNLLYYGIKEFELAKCDARDLCLDGDAIVTDPPYGRYSKVYGNILELYKGFLSKAIEKNINIVSMLYPEFLNPELFVPKGYKILLDRPWVSPGIRRHFLLLERRNKNE

SEQ ID NO: 860 - DNA, 2109 bp, Nanoarcheum equitans
gtgccaaataaaaacaaagaaactattaaagttaaagccgagtactatatagaattccctatagcaagatggatacaaaaggttactatacataatcccaacaattacgctataaataattataccttaattattaatattgattcaaaattgggaaaagcgaaagaattattcgcaaactctgcaaatagtgaattaaagcaatatcaatattttgttgcatttgatagtaaggaagttttgcctttctgttatttagatagcgaaggtttttgtactgatacagtaacaaataaaatagctgttaagattgatgaattaaagccaggacaaacttacacattttacattggtttaacaaacaaagattattcttctcctccaaaagatgtgtttctattctatgctgattttgaaaatgatataaataaccttgcatcgcttagagagtattttgatgtgtatgcaaataacaacccttgtataactgcatgggattcaaatggtcttcctttgacttgcgggggatatagccaagttacaacaatttcaccaaaagtgaatatttcattggagacaccattagaaataaaagtaaaatacaaagcaataaaaattagggattatgttgcagacggcttcgctgttagtttatttaggaaatgctcaacacataattcgttacctggagaatccttaggaacatgttacaacaataatggtattatagtagaagaagacttctggcaaaattctgaagacccaactgctcaccatttctcaatagactacaaccatgtgcataatatcgtatcctgggttgatttgggaagcttcatagatggcaatagaacaatggttataaaaataaaacccagttcaagagttagagtagatgcggctttgtattataatgataattggtataatattagtgccgaattggataaaccaaatggagatgctataacattttctgctgccactggaggagaaatttcaaaagtatacctaaagaaaatcgctatactaagaaatgacgatgtttcagttagtacttcaattattaagcaacccgacaatgttaactttgattaccaaatgaataccacgctatatacattctcttctaaatgggataggtttactgtaacatttaatgaatacagctccctctatagattggtaaatgacgatagtttaaacattgccccgggctgtgttatgcatttatatggatgcaatgacccatcttcaataaaagtgggtaaaacaatatttaaagtgaaaaacggggattatattagaataccatggggcactgagcccagcgatgaacctaattctatttacgactattatatagatggtaacaacttctttgatttagtaagtatatacgatctttcctgccctagctctccaaaatgttggaacaacccagcaagctattgtgaaaaaagaagagataacatatatcctacatattggaatagctatgtaacttatgtaaatataagaagcaacggcaattgtggtactgctataaataataagacaacttattgggtttgcggagaaataataaaattcccatttggtttgggagattatgaagaaatcgatttaagttatagggccaaagagtatagatggaattctaattttgtatggtatttcccaggaaaagaagttgcaggttttgtggcttggaacaaccataatataagggttggcgatatagatagtggggtaccacatagcaacatccgctatatacaatactatattaaatacaagaacaatatattgagcgttagcacatcgcacgggttgcctacttttagcaaatattatacaggtaatttagatagactatatctaagaactggtactcatatgtgttcaagtgaaagcggtagaaactggtggtatatattctttgttgcaaaaaggaaaattggggacataaaaagtgaaaaacaagcgccattagtatacaaagttaaagtaggcggtactatagaaggggacaaagattatgtcaaaaaaatgatagaaaaatacaaaaactatgtaaaaaacataaaagtatatgtagatatctag

SEQ ID NO: 861 - protein, 702 aa, Nanoarcheum equitans
VPNKNKETIKVKAEYYIEFPIARWIQKVTIHNPNNYAINNYTLIINIDSKLGKAKELFANSANSELKQYQYFVAFDSKEVLPFCYLDSEGFCTDTVTNKIAVKIDELKPGQTYTFYIGLTNKDYSSPPKDVFLFYADFENDINNLASLREYFDVYANNNPCITAWDSNGLPLTCGGYSQVTTISPKVNISLETPLEIKVKYKAIKIRDYVADGFAVSLFRKCSTHNSLPGESLGTCYNNNGIIVEEDFWQNSEDPTAHHFSIDYNHVHNIVSWVDLGSFIDGNRTMVIKIKPSSRVRVDAALYYNDNWYNISAELDKPNGDAITFSAATGGEISKVYLKKIAILRNDDVSVSTSIIKQPDNVNFDYQMNTTLYTFSSKWDRFTVTFNEYSSLYRLVNDDSLNIAPGCVMHLYGCNDPSSIKVGKTIFKVKNGDYIRIPWGTEPSDEPNSIYDYYIDGNNFFDLVSIYDLSCPSSPKCWNNPASYCEKRRDNIYPTYWNSYVTYVNIRSNGNCGTAINNKTTYWVCGEIIKFPFGLGDYEEIDLSYRAKEYRWNSNFVWYFPGKEVAGFVAWNNHNIRVGDIDSGVPHSNIRYIQYYIKYKNNILSVSTSHGLPTFSKYYTGNLDRLYLRTGTHMCSSESGRNWWYIFFVAKRKIGDIKSEKQAPLVYKVKVGGTIEGDKDYVKKMIEKYKNYVKNIKVYVDI

SEQ ID NO: 862 - DNA, 543 bp, Nanoarcheum equitans
atgaacctagcgaagatagcgagaaaaatagttgaatacgctttagaaggtaaagattacgaaatacccgatgaaataaaagaaaaactaaactataaagctggtgcgtttacaacgataaaaactttggacaaccaattaagaggttgtatggggataccatatccaatataccctctatggcaatccctaaaatacagcgctttaatggccgcttttgaagatccaaggtttccaccattacaaaaagaagagttagataatgtgaaatttgaggttactgttttaacccctccaagaaagttaatagttaataacccattagagtatttggaaaaaataaaaatcggcaaacatggtataataattaaaaggggcccatattccggtttattattgccccaagttcctatagaagaaggttgggacgctaaagagtttttatcctatggctgcttaaaagcaggcttaccaatggattgttggttagacccaaaaaccgaagtatatgttttcgaaggacaaatttttgaagaagactag

SEQ ID NO: 863 - protein, 180 aa, Nanoarcheum equitans
MNLAKIARKIVEYALEGKDYEIPDEIKEKLNYKAGAFTTIKTLDNQLRGCMGIPYPIYPLWQSLKYSALMAAFEDPRFPPLQKEELDNVKFEVTVLTPPRKLIVNNPLEYLEKIKIGKHGIIIKRGPYSGLLLPQVPIEEGWDAKEFLSYGCLKAGLPMDCWLDPKTEVYVFEGQIFEED

SEQ ID NO: 864 - DNA, 570 bp, Nanoarcheum equitans
gtgcaacatttctttatggctaccttattggtaagcttggagggtagaaaatataattatgaaggcccttttatattccaacaaatttttgataaaatttttgagattgccaaaaacaaaaaaattgatgtacaattaaaagagtatactgaaaaattagagaatggaaagaagaatataagtttcaatttagattgtagtaaaaaagctgatgacatacatacatataaattttctatttctttcgaatttaattttgatagaattaaacaaaataatattgatgtcgattggggttctataaatattgcttgtaaaaatttggttatagatataaaagaagaaacaaaggagaacccaaagcttatagatataataaaaatggttagcgatttgattacagcgaaactgaaaatagaagagcacaaaaataaaatatttgaagtgtgtgatgattttgttaaagaaatattaaaagaagcaaaagcttattatggtcttaaaagatctttaaatatgggagacaataaaaacaatgaacctagcgaagatagcgagaaaaatagttga

SEQ ID NO: 865 - protein, 189 aa, Nanoarcheum equitans
MQHFFMATLLVSLEGRKYNYEGPFIFQQIFDKIFEIAKNKKIDVQLKEYTEKLENGKKNISFNLDCSKKADDIHTYKFSISFEFNFDRIKQNNIDVDWGSINIACKNLVIDIKEETKENPKLIDIIKMVSDLITAKLKIEEHKNKIFEVCDDFVKEILKEAKAYYGLKRSLNMGDNKNNEPSEDSEKNS

SEQ ID NO: 866 - DNA, 750 bp, Nanoarcheum equitans
atgttcagaaggagcataaccccaattattgcagtagtaatgatgttaatgatgactgtgatggctgcaggtgcggtatttacatggtatcaacaattccaacaacaacaattacaaaaggtaacaaaaagcgctgctgctttagctaaaaacatagccttcgcggttaatgaagctaggtggaataacaaatatggggaatccaaagaattcgatacaaatggcgataataccaacgatctaaaagtaacatatgtaacattccaattcacaattactaattctggagatgatatggatttgaactctaaaaacccattagcctttgctgcgttgtctgaattaactacaggtactccaatagtacaaagctctccaggtgttttagtagttgacaaaactaatagcttaaatgtttacccaacaaaccttaattttgctaataacaaagttgatttgactaccccatccaatgagcaagtaacaatagtagatgtaggaaataatgcattaacaaacccattagtatgttatagggttgtaaccacagaattaaaccatccaataaatatagttgcatctggagaaacagcgaggtttaactgtatggctgtaattaaggttgaaacatctacagatggaactacttggaatgcagtagattactctccaaaaggttatgatgcaaccaaagattacaatatagaagtccattatggtgcagtaacacaagtggcacaaattcaataa

SEQ ID NO: 867 - protein, 249 aa, Nanoarcheum equitans
  signal (1)..(22)
MFRRSITPIIAVVMMLMMTVMAAGAVFTWYQQFQQQQLQKVTKSAAALAKNIAFAVNEARWNNKYGESKEFDTNGDNTNDLKVTYVTFQFTITNSGDDMDLNSKNPLAFAALSELTTGTPIVQSSPGVLVVDKTNSLNVYPTNLNFANNKVDLTTPSNEQVTIVDVGNNALTNPLVCYRVVTTELNHPINIVASGETARFNCMAVIKVETSTDGTTWNAVDYSPKGYDATKDYNIEVHYGAVTQVAQIQ

SEQ ID NO: 868 - DNA, 573 bp, Nanoarcheum equitans
atgaaatctcagtcacatttaattgagtttgttttggttattgggatagctttagcgggtttgtcttcagcattaatgtgggccaaacctttatggaataaatctttttcgaaaaccaaatatttaaaattcgttgatagcgcaaaagagatatacaaagccttaattaacattgataaaataaaggaaaaaacatttaacatagaatatgataagctttatgctaacgaaacctttatggaaatctcgataaaagggaacttttttaagggtattatgggttattggtttcctttagttgaaggcatctatggggttaaccctataaatggaaaactagagacaaaccaaacccaatatttggttttaccttatattaaaattactccgaacgaggttaaggttagatattatttcccttatgctaaaaaatccgataaattatgctataaactattaccccaagaaacgatcaaaacgaatgggaatagcataaccattcgagttatggatgtacaatacaaaaacgaaccttgccctgttacgatagtttacacattatatattgcataa

SEQ ID NO: 869 - protein, 190 aa, Nanoarcheum equitans
  signal (1)..(24)
MKSQSHLIEFVLVIGIALAGLSSALMWAKPLWNKSFSKTKYLKFVDSAKEIYKALINIDKIKEKTFNIEYDKLYANETFMEISIKGNFFKGIMGYWFPLVEGIYGVNPINGKLETNQTQYLVLPYIKITPNEVKVRYYFPYAKKSDKLCYKLLPQETIKTNGNSITIRVMDVQYKNEPCPVTIVYTLYIA

SEQ ID NO: 870 - DNA, 411 bp, Nanoarcheum equitans
gtgaaacatctagttgtatctgctaaaagaaaaacatcaatagccagagcatactttagagaaggcaatggaataataagaatcaatggatttttattagaagtatggcaaaacccattagcaagagcaagagtaaaagagcccttaataatagcagaaaacattattccaggaataactaaagagattgatattaatgttaatgtatttggtggaggatggcattctcaaaccgaagcagtgaggcaagcaatcgctaggggtttagtagtatggacaggtagcgatcaattaaagaaagctttcttagaatatgataattggttattagttaacgacccaagaaggaaagaacaaaacaaatcccttagatctaagccaagggcttggagacaaacttcttacagatga

SEQ ID NO: 871 - protein, 136 aa, Nanoarcheum equitans
MKHLVVSAKRKTSIARAYFREGNGIIRINGFLLEVWQNPLARARVKEPLIIAENIIPGITKEIDINVNVFGGGWHSQTEAVRQAIARGLVVWTGSDQLKKAFLEYDNWLLVNDPRRKEQNKSLRSKPRAWRQTSYR

SEQ ID NO: 872 - DNA, 378 bp, Nanoarcheum equitans
ttggagacaaacttcttacagatgaaggcaataaattatactatcgtttcctttgtattattggtaacaattggtttagcactattataccaactaacacccatatttaatttaagcaaatatgagaaaaaggaatgtctaatagatataaagaagttctctgttttaggtaaccaattgaacataaatttggattataacaaatattgctataggtttgacatagctataaaaaacaacaaaaaaacattatgcacttttacagaggtccctaaaaatgttataaccttaactcttaataattgcaacctaactcatggcaaacaatatatattatctataaacggaaaagatctgacaactttctattacccttaa

SEQ ID NO: 873 - protein, 125 aa, Nanoarcheum equitans
METNFLQMKAINYTIVSFVLLVTIGLALLYQLTPIFNLSKYEKKECLIDIKKFSVLGNQLNINLDYNKYCYRFDIAIKNNKKTLCTFTEVPKNVITLTLNNCNLTHGKQYILSINGKDLTTFYYP

SEQ ID NO: 874 - DNA, 471 bp, Nanoarcheum equitans
ttgaaaggaaaccaaaaccttttgaatggaaattctaagctatactttttccttattgtattagctctatctcctttattatatatagagctaccaatagatagatctgtttttgcaaaactaataagctttgggaggccaacacattatagtgcgataataaataatagatgtataatcgatataacatatgactgccttgggataaaaaatgttgtctcttttgctatattggttgtggcctatgcattagcatacaaaaaattttatgcaaaaaagttcgttttttattctctactaatatttgtgattaatttagtaagggtaattgtaatatcttatatgccttgcgatattgttaatactatgcatacaataagttggtttgcctttagttatattattgtgccatttatgttcatattttatattaagggtaatagaaagttgtcagatcttttccgtttatag

SEQ ID NO: 875 - protein, 156 aa, Nanoarcheum equitans
MKGNQNLLNGNSKLYFFLIVLALSPLLYIELPIDRSVFAKLISFGRPTHYSAIINNRCIIDITYDCLGIKNVVSFAILVVAYALAYKKFYAKKFVFYSLLIFVINLVRVIVISYMPCDIVNTMHTISWFAFSYIIVPFMFIFYIKGNRKLSDLFRL

SEQ ID NO: 876 - DNA, 495 bp, Nanoarcheum equitans
atggatgaatatgaaatagtgccagacccaatacaaaaaataatgcaagaaattgaaaagcttaaaaaagaaagggaagaatccaaagaagtaataaaagaagtattagactttgctaaagccaaccaacaaatggtgtcctctttagtcaaagtaaacctagaactaaatgctaaagtttccgaattaatagttggtattaatgatttagtaaaaagaatagataatctaattagtttaatggaggaagcggctaaagaaactgttgctccagatgtttctaatttagaaaaacaaataaaaacaatgcaacaagagtttgaagagataaaagcaagcatcgcggatttggctaatagtataagaacattaaacaaaagcttatctgaaataagggagagccttgttagtaaaccacaaccaatcgagccacctactcctacaatagaaaaaccaattgaaaggaaaccaaaaccttttgaatggaaattctaa

SEQ ID NO: 877 - protein, 164 aa, Nanoarcheum equitans
MDEYEIVPDPIQKIMQEIEKLKKEREESKEVIKEVLDFAKANQQMVSSLVKVNLELNAKVSELIVGINDLVKRIDNLISLMEEAAKETVAPDVSNLEKQIKTMQQEFEEIKASIADLANSIRTLNKSLSEIRESLVSKPQPIEPPTPTIEKPIERKPKPFEWKF

SEQ ID NO: 878 - DNA, 561 bp, Nanoarcheum equitans
atggcgcgcctaaggagatggcactgctatagaaaattggaagtcccttatactagggtatcaagatctaaaaacaaaaactatatacctggggcaaaacccacaatggttaggttattccatatgggagagctaaccagaaatccaagcgaatggcaatatgaagcatctttagtagctaaagaaaaccatcaaattagggataacgcaatagaagctataagagttatggttaacaaatatttggaaagcactttaggtaaaaagaggtatctatttataataaggaaatacccccaccacatatacagggaaaaaccagtggtgggtggttatgctggagcagacagaattagtcaaggtatgagattaagctttggcagaccaaaaggaagggctgtccaaatatatgaaggagaaaagctattatcaatatttttcgatgatataacaaaagcaaaagacataaaatattttttacaagtagcaagatccaagttaccttggagatatagggaagaaatagttgaagtaaaatctggaaagccattagctctttaa

SEQ ID NO: 879 - protein, 186 aa, Nanoarcheum equitans
MARLRRWHCYRKLEVPYTRVSRSKNKNYIPGAKPTMVRLFHMGELTRNPSEWQYEASLVAKENHQIRDNAIEAIRVMVNKYLESTLGKKRYLFIIRKYPHHIYREKPVVGGYAGADRISQGMRLSFGRPKGRAVQIYEGEKLLSIFFDDITKAKDIKYFLQVARSKLPWRYREEIVEVKSGKPLAL

SEQ ID NO: 880 - DNA, 513 bp, Nanoarcheum equitans
atgctattatatttagttaacttccaatctatgtgggcaaactatgttttagaattattaaaagatgcttttgcatttaaaataaaagcgaaagaattagatatacctttagcagcatacaacccatttagaaaacaatttagcgcccaactattattggattacgttgtagaaagatataaagatgggttagtgtttgctataattgatgaagacatatacgatagcaattataattttgttttcggtttagcttatccctttagaggggcaatagtttctacctatagactaaaaaacttcgaaagaattaaaaaagaggttttacatgaaatggggcatgtttttgggttagggcattgtaataactattgtgtaatgcgcttctctaattcggtttttgaagtagatgaaaagcccgataaatattgcgaaaattgctatagggaaattttaaacaatggattttatgttaatcccaaatatgtcatttttaaagaaaattataactaa

SEQ ID NO: 881 - protein, 170 aa, Nanoarcheum equitans
MLLYLVNFQSMWANYVLELLKDAFAFKIKAKELDIPLAAYNPFRKQFSAQLLLDYVVERYKDGLVFAIIDEDIYDSNYNFVFGLAYPFRGAIVSTYRLKNFERIKKEVLHEMGHVFGLGHCNNYCVMRFSNSVFEVDEKPDKYCENCYREILNNGFYVNPKYVIFKENYN

SEQ ID NO: 882 - DNA, 684 bp, Nanoarcheum equitans
atgactataactttatatcttgataagccaccatggtttgcaaaccttttaagaaggctaattatggaagaagccccttcgatggcgatagaagatgtttatgtacatcaaaataatgtatattggaatgaatggtttgccaatagattaggtttaatccctatatatgctccaatagactatataaaaaatgacaaggtcgtaaaagcttccttaaaagtaaaagacagggaaggctgggtttatgctgatgaaataaaaatagaagacgaaaatgtgaaaattgcctataaaaaaataccattgatttgggttgaaaagtggcatgaaatagatatggagttcgaaataaaagttgggcaaggcaaagttcattctaaatggataccagcacatacatggtattataaagaagtttacggcatactaaagaaaaaggacaataaaacaaaagaactaataaattctttagggctaaaaattgatggaaataaagtttatggggatagaaccaaattagaagctttagagaaagaaggaattttagagctaaaagagacaggaagaatagtatttaatatagagggctttggcatggtggaggaaaaagaaatattgcctttagcaatagatgttttcgttaataggttagacgaatacataaaaactctaagcaatgagtaa

SEQ ID NO: 883 - protein, 227 aa, Nanoarcheum equitans
MTITLYLDKPPWFANLLRRLIMEEAPSMAIEDVYVHQNNVYWNEWFANRLGLIPIYAPIDYIKNDKVVKASLKVKDREGWVYADEIKIEDENVKIAYKKIPLIWVEKWHEIDMEFEIKVGQGKVHSKWIPAHTWYYKEVYGILKKKDNKTKELINSLGLKIDGNKVYGDRTKLEALEKEGILELKETGRIVFNIEGFGMVEEKEILPLAIDVFVNRLDEYIKTLSNE

SEQ ID NO: 884 - DNA, 732 bp, Nanoarcheum equitans
atgagtaatatagagaaacaaataatagagatattaaagaagaaacctaagggcgcaactataaaagagattgctgaagagttaggaataaataaaatgactgctttaaggtatttagaggttcttaaaactaaaggaatagttgattatgaagaaaataggagggccaaaatttggtatgttgttggagagacctctttattagaaatattcaaaagcgagaaaccatatttgaaattcctaaaatacgagcaaggcaatattttattgctagacgatatattaatggttgttttgcctgcatcttttttctctaatatttatgatttatatggggaagaagcaagccaaaaattataccaattaggttacgaatttggaaaaacactatcttttatatatgaaataaatactggggttaaagtatccaatataggcttattgcctgcaacagttaggtctttgctaagctttttcttaagagggggctttggagagttagaaaaaattgaggattataaagacaaaatggtaataaaaataaaaaatagtttatttcctaaaattttagaaggaaaaggcaagaaatgccatttcttagctggttacatagcagggatagctaatgttttaacaggcaaaaacttaaaagtttatgaatccaaatgtgttggagaaggttataactattgtgaattcgtgataatgaagaatgattcaaccgctgaataa

SEQ ID NO: 885 - protein, 243 aa, Nanoarcheum equitans
MSNIEKQIIEILKKKPKGATIKEIAEELGINKMTALRYLEVLKTKGIVDYEENRRAKIWYVVGETSLLEIFKSEKPYLKFLKYEQGNILLLDDILMVVLPASFFSNIYDLYGEEASQKLYQLGYEFGKTLSFIYEINTGVKVSNIGLLPATVRSLLSFFLRGGFGELEKIEDYKDKMVIKIKNSLFPKILEGKGKKCHFLAGYIAGIANVLTGKNLKVYESKCVGEGYNYCEFVIMKNDSTAE

SEQ ID NO: 886 - DNA, 1047 bp, Nanoarcheum equitans
gtgttatgtttaagtcttatgcgaatattctgctctaaatgtttagaagagcaggaatgccctttaccatgggagttagaaaaatatgaaatatgggttaaaaaagaagctgaaactaatgaaaaatggggcgaagatccttataatagaccaatagagagattattaaaatattctgtaataaatttggacaaaccttctgggcccacttcacatcaagttgtagcgtgggtaagagacatagttggtgtaaaagcgggccatggtggtactttagacccaaaagtaactggggtattgcctatagcaattggagaagccacaaaagttttacaaactttgttaatagcaggtaaagagtatgtagctctaatgcatttgcataaagaagttagcgaaaaagatataattaaagttatgtccaaatttgtaggtactataatacaaacccccccattgagaagtgctgtaaaaaagagacctagaaagaaaaaagtttattgtattaaaataatagagatagatgggaaagatgttttatttagagtttctacccaagggggagtatatattagaaagctaatccatgatataggagtaaagcttggagttggggcacatatgcaagaattaagaagaataaagtctgggccattccatgaaaacaattcggtatatttgcaagacatagtggattctctatatttttggaaagaagaagggaacgaagaatatataaggaaagtgtttttacctgtagaagaggctgtaaaacatttgaaaaaaatatatattttagatagtgctgttgctgcaattgtgcatggggccaatttagcagtgccaggaatagccaagctttatagcaatataaagaaaggcgatttagtttcgatacatacattaaaaggagaattagttgctattggtatagcccttatggattctaaagaaatgttagaaaagaaaagaggaatagctgtagatatagaaagagtatttatgaaacctggtttatatccaaaaatgtgggtcagccaaggctga

SEQ ID NO: 887 - protein, 348 aa, Nanoarcheum equitans
MLCLSLMRIFCSKCLEEQECPLPWELEKYEIWVKKEAETNEKWGEDPYNRPIERLLKYSVINLDKPSGPTSHQVVAWVRDIVGVKAGHGGTLDPKVTGVLPIAIGEATKVLQTLLIAGKEYVALMHLHKEVSEKDIIKVMSKFVGTIIQTPPLRSAVKKRPRKKKVYCIKIIEIDGKDVLFRVSTQGGVYIRKLIHDIGVKLGVGAHMQELRRIKSGPFHENNSVYLQDIVDSLYFWKEEGNEEYIRKVFLPVEEAVKHLKKIYILDSAVAAIVHGANLAVPGIAKLYSNIKKGDLVSIHTLKGELVAIGIALMDSKEMLEKKRGIAVDIERVFMKPGLYPKMWVSQG

SEQ ID NO: 888 - DNA, 813 bp, Nanoarcheum equitans
gtgggaatactaactaaaatattgattaaacataagctattgccgtttattttgtttataataatggggtatttgtttgcaatagacaaaagagcaaaaactttagaaattattgttttggcctctttattagggttagtgacatataatttaactgtaaaaaacaagcttacagctttgttaacaggtttatttggattgccatatttaataacaatatacaaaggcaaaaaaccctctttcaatactaaaaacaaagaaataatagagataaaacctgctttagttggggttttagctgtgctattagcttcaataattcctacattgtctccatctatagcgatattctttatacaaaaattatttaatataaaaggagatttaccttttgtttacgctttaggttctttaacaacagcagatgttgttatatctttagcgaatttctattttaatggctccgcaagaaatggtgctatagtttttgtcaagaatttactaggaaaaatagattttaatacttttctgttgtttttggctaacacaattgttagcataattatagcttttattgccacatatgtttttgctaaacatttgataaaatacgaaatagatgttagaaagattaaaccaattttgataggttttataataatatacctaatagcagtttctggttttgttgggttattaatagcattaacagcaatgtttgttggtttagaagcaataaaaaataatataaattacagcactttgggtgtggcattaatgttcccattagctataaatatattgcttagttaa

SEQ ID NO: 889 - protein, 270 aa, Nanoarcheum equitans
  signal (1)..(27)
MGILTKILIKHKLLPFILFIIMGYLFAIDKRAKTLEIIVLASLLGLVTYNLTVKNKLTALLTGLFGLPYLITIYKGKKPSFNTKNKEIIEIKPALVGVLAVLLASIIPTLSPSIAIFFIQKLFNIKGDLPFVYALGSLTTADVVISLANFYFNGSARNGAIVFVKNLLGKIDFNTFLLFLANTIVSIIIAFIATYVFAKHLIKYEIDVRKIKPILIGFIIIYLIAVSGFVGLLIALTAMFVGLEAIKNNINYSTLGVALMFPLAINILLS

SEQ ID NO: 890 - DNA, 2331 bp, Nanoarcheum equitans
atgcgtatcctagttactgcggctttgccatattcgaatgggccaatccatttgggccatatcgctggggcttatctgccagcagatatattttatagattcgtaaaactaaaaggatataatgcattgtacatatgtgggtctgaccaatatggatcgcctatcgaattaaacgcaataaaactaaacatagatccaaaggactatgcttcattctatagaaaaatacaagaagagattttcaaaaaatttaacataaaatttgatatatattcaggaacggccgaatccaatatacatcctataatagtaaaggaattctttttatcattatttagtgcaggccttttaatagaaaaagaacaagaattgccatatgatcctaaaataaaaagatttttaccggatcgatttgttgtagggcaatgtccctattgtgggtatgaaaaagcctatggggatcaatgtgaaaaatgtggtagactattagagcctaaagagttaattaatcctaaaagtgccataactggagaaaaagtaattttcaaaaagacgagacatttgtttttcaatattccaaaattaaaagataaactaaaacaatacattgaatctaaaaaggatgtatggaatgattttacatacagttggtctttagcattattggataactttaaagaaagggcaataactagagataacaaatggggcgtaaaagttcccgctaaggagatgttagaaatattaaaaaaagctctaaaagaaggaaaaaccccaaaagatttcggtttattaattgatagtactaacgaaaaagatttagaaaatcatataaaagaatacgaaaacaaggttttatatgtatggtttgatgcgcccatagggtatatatcttttacttttgagacttctcctgaatatagatattattgggacgaaaaagaaaaaccttatatagtgcattttattgggaaagacaatattcctttccatacaatattttggcctgcattaataattgggcgaaatttgggatataaaaatataaaccatatattagatttcgatatagctttgccttaccaagtatttggtaatccttatctaaactattatggcaaaaaattctcaaaaagcaaaaggtggggggtatttttggataacatagataaaatagatatagatatagactatttcagattctatttagcctacattcatacagtgtctaaagatatgtctttcgaatgggaccaattcaaagaagtaataaacaaagaattagtcgataacattggcaattttatccatagggttttaacctttatatacaatagatttaatggtattcccccaaaaatagagcatctagacgacaaagataaagaacttttagataaaataaagcaattacccgaaaaagtgtttaactttatatggaagggcgaaattggaaatgccttaagagagatcgttaatacctctaatttggctaacaaatatttccaagaaaaagagccatggaaaactaatgatccaaatactattgctattgctttcgaagcagtaaaaacctttataattctgttatatccatttattccggaaaaggccaaactattagcgtctatagctaatatagatataaaatgggatttcaatcaaaaagtagaaaaaataaacaaaccatttatcgttttccacaaattaagcgataaccaaatagaaatggcaaagcaaatcttaaccaatccaaaagaatatgatttgggtaaaaagaaagttataggtgttttaagatatgaagatgagttatataaaatagaattagaatgtgacgacaacccatgggtttgtctaaaaagagagttagataaaagaaaaataaaatacatatatgatacagttaaaggggatgtacccccacatataatagatggcaatacttatatatatttattgccggcattagagaaacccaatttagaaaaggcagaagaagaatatggcttagttagctatttggattttgctaaactagacatgagagttggtaaaattatagatgtgcaagaccacccaaatgcggataagctttatataataaaagtaagccttggcaataaacaaaaaaccttagttgggggactaaagcaatattataaaaaagaagagctaataggaaagtacgtagttttaataaataacttaaagcctaaacaattaagaggaataacatcagaaggaatgctattagctgcagacgatggtaaagaggtagcattattaatgccggacaaaccaattagtttaggttcaaaagttcgttaa

SEQ ID NO: 891 - protein, 776 aa, Nanoarcheum equitans
MRILVTAALPYSNGPIHLGHIAGAYLPADIFYRFVKLKGYNALYICGSDQYGSPIELNAIKLNIDPKDYASFYRKIQEEIFKKFNIKFDIYSGTAESNIHPIIVKEFFLSLFSAGLLIEKEQELPYDPKIKRFLPDRFVVGQCPYCGYEKAYGDQCEKCGRLLEPKELINPKSAITGEKVIFKKTRHLFFNIPKLKDKLKQYIESKKDVWNDFTYSWSLALLDNFKERAITRDNKWGVKVPAKEMLEILKKALKEGKTPKDFGLLIDSTNEKDLENHIKEYENKVLYVWFDAPIGYISFTFETSPEYRYYWDEKEKPYIVHFIGKDNIPFHTIFWPALIIGRNLGYKNINHILDFDIALPYQVFGNPYLNYYGKKFSKSKRWGVFLDNIDKIDIDIDYFRFYLAYIHTVSKDMSFEWDQFKEVINKELVDNIGNFIHRVLTFIYNRFNGIPPKIEHLDDKDKELLDKIKQLPEKVFNFIWKGEIGNALREIVNTSNLANKYFQEKEPWKTNDPNTIAIAFEAVKTFIILLYPFIPEKAKLLASIANIDIKWDFNQKVEKINKPFIVFHKLSDNQIEMAKQILTNPKEYDLGKKKVIGVLRYEDELYKIELECDDNPWVCLKRELDKRKIKYIYDTVKGDVPPHIIDGNTYIYLLPALEKPNLEKAEEEYGLVSYLDFAKLDMRVGKIIDVQDHPNADKLYIIKVSLGNKQKTLVGGLKQYYKKEELIGKYVVLINNLKPKQLRGITSEGMLLAADDGKEVALLMPDKPISLGSKVR

SEQ ID NO: 892 - DNA, 741 bp, Nanoarcheum equitans
atgcttgatatacatgcacattgctttatggtaggtaaatgcatagaggaaataagggatatgatagtagtagagagcgggcttaactatgaaactaacgaaatagttttagaagaatcaaaacaggaaaatgtctattttagtgccggcctacatccaacagaggtagtaaagctatcagaattagaaatagaaaaaacaataaaacaaataaaaaatttatgcgaaaacagtaaatgtattggagtaggagaaataggcttagactattattggcacaaagacaaaaaagaaatcgataaacaaaaacattattttagaaagctattggaattggccgaatctattaaaaaaccagtaataatacattctagagatgcggaattggattgtttggaaataatggaatcctataatattaaagcagtaatgcatagctttatgcccaaaaaagattggaaaatcgctttaaacaaagctttagatttaggatattatatttctatcccagcaataattgtaaaaaacaaaaggttaaagaaaattgctagggataccccattggaaaaaatgtttaccgaaactgatagcccattcttagacccagagggcaatagaaataatagaccatacaaagttaaatatgccatagaagagatcgctaaaataaaagggttagattttgaagaagtagaatcacaaatagacaaaaattttaacgaacttttgaacctaaactaa

SEQ ID NO: 893 - protein, 246 aa, Nanoarcheum equitans
MLDIHAHCFMVGKCIEEIRDMIVVESGLNYETNEIVLEESKQENVYFSAGLHPTEVVKLSELEIEKTIKQIKNLCENSKCIGVGEIGLDYYWHKDKKEIDKQKHYFRKLLELAESIKKPVIIHSRDAELDCLEIMESYNIKAVMHSFMPKKDWKIALNKALDLGYYISIPAIIVKNKRLKKIARDTPLEKMFTETDSPFLDPEGNRNNRPYKVKYAIEEIAKIKGLDFEEVESQIDKNFNELLNLN

SEQ ID NO: 894 - DNA, 939 bp, Nanoarcheum equitans
gtgaggggaataaacgcgctaatagcaattattgttttagtggcaatagtgggtttagctgctgtaagcgttataagctttgtacaaaaatccatatcgcaacaacaaaaagagataatacaaaaaaatgaatttaacaaattccatactatagggaaaatagccattagaacggaaaccccttatgcggacaaagatactatagtaaatattagaatagatttgaaaccagtacaagatatagtatctaaatacggcagttttgccttatgtgatgacccaagctgttctggaaatagatattattattgctgggaaactcctaatggggaatgtgtaagagatttgaacaaaaattggaataaatatattatttgggttagaattgatagattctattcgcccattgtcctatatatggtttatgggaagggcaaaacaaatgttgacgggaaagacatatttttattatatacaaacggttcttatttagatggttttgaatcccaaggggaagttacaacaaacaatggaataatagagctaaaaaatgcgtcttctttagttactaatagttatgcgattaaagaaaaatacaatttagttgctcgattacaattccaaatcaaaaacaataacaaaacaacaattagttttaatgtaaccgaccaagtatatattaaagggctagatgtctataaaggaaacgaaaaaataacaactttggaagcaaataccaattatttatatataaacaaattgcaaggctatcctaaagagaatatatacattataaaaggaaaacaaatagttttaccttatggaaatgataaagtctcttttacaataaaaacaacagacaattcagatgtgttaatagattggattatgctatattacgaaccaataaatgttaatgtgtatgtagaaaaagaataa

SEQ ID NO: 895 - protein, 312 aa, Nanoarcheum equitans
  signal (1)..(20)
MRGINALIAIIVLVAIVGLAAVSVISFVQKSISQQQKEIIQKNEFNKFHTIGKIAIRTETPYADKDTIVNIRIDLKPVQDIVSKYGSFALCDDPSCSGNRYYYCWETPNGECVRDLNKNWNKYIIWVRIDRFYSPIVLYMVYGKGKTNVDGKDIFLLYTNGSYLDGFESQGEVTTNNGIIELKNASSLVTNSYAIKEKYNLVARLQFQIKNNNKTTISFNVTDQVYIKGLDVYKGNEKITTLEANTNYLYINKLQGYPKENIYIIKGKQIVLPYGNDKVSFTIKTTDNSDVLIDWIMLYYEPINVNVYVEKE

SEQ ID NO: 896 - DNA, 720 bp, Nanoarcheum equitans
atgccaaagttattttccccacaagatgcagaattgttaaaaaaggaatttgaaaaattaaaaaacccagtagtttttggtttagtggtagacaaagatagagaaccattacatgtacatgatgaaactggccatcatgatatggatgctaatgaaatggccgaaatgttattgtccgatttaaaagaaataagtaatggcaagatagactataaagtttatgataaaagtgagaaaaaagaattttgccctgaaggggaatctaaatattgtgggcccatactatttttcgaagatagccctaatgttagatattatggtttgcctttcggagaagaaatgcctccatttttagatgacatagtaacaaaaggtactggcgaaccaatgctaccaccaaaagcaatagagctagcaaaagagatagatcaaaagttgcaagaaccaatatatgtttatgtttttattactccaacatgtcccaattgtccttatgctacagaagcaacccatcaattaggattaatttctaataaagtgcacgcttatatgatagaggcatatgaattcccagattgggcggacaaatacaatgtatatggagtaccaaagatagtaattaaagactctaaaggcaatactttagatgaatgggaaggcacatttagaataccaatggcatgttatgaaagaattttggaagcaataaataaattataa

SEQ ID NO: 897 - protein, 239 aa, Nanoarcheum equitans
MPKLFSPQDAELLKKEFEKLKNPVVFGLVVDKDREPLHVHDETGHHDMDANEMAEMLLSDLKEISNGKIDYKVYDKSEKKEFCPEGESKYCGPILFFEDSPNVRYYGLPFGEEMPPFLDDIVTKGTGEPMLPPKAIELAKEIDQKLQEPIYVYVFITPTCPNCPYATEATHQLGLISNKVHAYMIEAYEFPDWADKYNVYGVPKIVIKDSKGNTLDEWEGTFRIPMACYERILEAINKL

SEQ ID NO: 898 - DNA, 753 bp, Nanoarcheum equitans
atgaaagaggaatggaaagtctttagaggttttctagataattatactttaaaaaatttagccaaactagaaagctctggttatttggatagcttagaatatattgttgcagagggtaaggaaagcgtagtaattaaaggaaaatacgaagacaacgatatcgctataaaaatttatagagtgatgaacataaattggaaagattttcatcgctatctaagacaggatagaaggtttaagggcattagatggagtagagtagaaataattaacgaatgggttagaagggaatattctaatcttatgagagcttacaagtatggtattaatgtgccaagaccaatattttataggggcaatgttttagcaatggaatttattggcgatcaatatccagcacctaagctaaaagatatagattttgatgaacaatctataaataaggttaaagagaacctatctaaagatttggaattgttagttaaaaaagccaaaatagtgcatggcgatttaagcccattcaatattttatactatagggaaaaaccctatataattgatgtttctcaagcaattccaatagattcgccagaagcaataaacttattaaaaagggatttttctaatataaacttctttctaaagaaatatgggctttctttggatagtactttattagatgatctaatattattcataaagagaaaaaccagtaatgatatagagctatttactaaaccaggattgccttaa

SEQ ID NO: 899 - protein, 250 aa, Nanoarcheum equitans
MKEEWKVFRGFLDNYTLKNLAKLESSGYLDSLEYIVAEGKESVVIKGKYEDNDIAIKIYRVMNINWKDFHRYLRQDRRFKGIRWSRVEIINEWVRREYSNLMRAYKYGINVPRPIFYRGNVLAMEFIGDQYPAPKLKDIDFDEQSINKVKENLSKDLELLVKKAKIVHGDLSPFNILYYREKPYIIDVSQAIPIDSPEAINLLKRDFSNINFFLKKYGLSLDSTLLDDLILFIKRKTSNDIELFTKPGLP

SEQ ID NO: 900 - DNA, 483 bp, Nanoarcheum equitans
atggaggtttatgcgtttatcgaagtgccaaaagggagcaatgtaaagtatgaatatgaagatggtaaattaaaggttgatagaatattatatggggcaatgttttacccatacaattatgggttcataccagagactttagaagaggatggggatcctttggatgtactagttattactgaagaaccattagtgcctggctcttatataaaagttaagcccattggagttttagttacagaagatgaaaaaggggtagacagaaagataatagctgtaccagtaaaaaaagtagacccaatctatggggaaatagaggatataagtgaattaaaagagggaataaagcttaaaataaaacatttctttgaaaggtataaagaattagaaccaggaaaatttgttaaagttaaagaatttttaggaaaagaagaagctgagaaaataataaaacaagcacaagaaaattataagaaacaataa

SEQ ID NO: 901 - protein, 160 aa, Nanoarcheum equitans
MEVYAFIEVPKGSNVKYEYEDGKLKVDRILYGAMFYPYNYGFIPETLEEDGDPLDVLVITEEPLVPGSYIKVKPIGVLVTEDEKGVDRKIIAVPVKKVDPIYGEIEDISELKEGIKLKIKHFFERYKELEPGKFVKVKEFLGKEEAEKIIKQAQENYKKQ

SEQ ID NO: 902 - DNA, 2037 bp, Nanoarcheum equitans
atgaaatattcaaaattcttattcacttggctagttttatcatcagcattatctctagtatggcctgctaactttccattagtatcgaagggagaaaaacttgttattggaaaaggttcaaaattagttattgcacttccgggccaaagcgagaataaaaatgagaacaaacaagaaccacaaaataccactagccaaaaacgtaataagcatttgctattagtaataaaaacccaaaagaataattttaccataaatgcgagtgatttaaaagtagacaatatatgtaaaatagaaaaactgtgggttgaaagcagtttgggtaaagaatgggatgttagattcattttcaaaaatggattaacttctaacaacatttgtatcaatgggtttaaaagcagttatacatacacaactcaatcaaaagaaataatttttgacaaacctgttactcttacaaaactttgtgtttatggagatataggtaaatatggaggagacataaaagtatatattaatggtaaatatgttggtactataaaacatgataacttttttgatgcaatttgtatacagccagtccccccaaccaatagctcaaacaaaagatatgtacctgttcccaattacgtatgtactaaatataagccagcatgtaggaaagaggttaggtggcctgttctctgggaagaaaaatttgtatgtgaatgggatccaaatgctagccaaaagttttacccaggggttaaagagttattagataaatatgaagaatgttgtgcatacaaaaatggctatattgaatgttacccatctctatgtgcaagtaataaaataagcggtttgcttaaagcaatacatagtgccaaggtttgtgtaagcaaggagcaatcaggttactacttttatgtatgggaatacggtacaaaatgtgcaaaatggggcccgtatcaatggtatgacactccccccaatgataaaaactatacttgcactcgtgagtataggtgtatagaatataaaacctactgtggaaaatgtattcgcaccattactaaacttggaacctgtactaaaccaaagtattgtactcgtcctaaatattgcactagaacaaaatattgtactaggacaaaatactgtactcgggacaaatactgtaaaaagagggtgtgtgatatgatgatgtatttcaaccccttcttctcccccccaacaataattgtacctgcatctattaaactaccgcttcctgggaagtgtattgcatctcatgaggaaaaatacaagtgtggaacgcaaagatatgcttgtggtactgagagatatccttgcggtactgaacaatatgtatgtggcattgaaaagtaccaatgtggaacggaggtatatacgtgccgtaaaaaagagaaaataatattgtataatatagaagaaagtagttgctcgggggaatgtagaaatagatatccaaaatgcgtaaagggcaaatatatgtataaatgtgaaaaatgtctacaatatgaccctgtactagtaaacagttacctaactcccccttactataagtataacgcactcgttggggattataagtgtataaataatacctatcaagatgtaaagtcaataagatttgaattaagttcaaaaatagatgaaaacgatttctgtggttatccgtttatggcacgcctacaattctatttgatttctgctaataacaataccacactgaaagtaaataacgaaacaataaaaccagaatccgtagaatctgttgatgtacaagccacaaagatagagtttgcttatcctgaaaagtttgagggatatgtcctattaaatgtgtggggagaaggtaactttactaaaaacgaatcttctgcattgaaggttagagaaaaagatggtaaaacattagttagcccattgcatgccattaaaagatttgcaagaaatgccagaaagaaaatgaaaagctttatagacaatgcccaaaagagatgtctattcccattctggcccttctgttaa

SEQ ID NO: 903 - protein, 678 aa, Nanoarcheum equitans
  signal (1)..(29)
MKYSKFLFTWLVLSSALSLVWPANFPLVSKGEKLVIGKGSKLVIALPGQSENKNENKQEPQNTTSQKRNKHLLLVIKTQKNNFTINASDLKVDNICKIEKLWVESSLGKEWDVRFIFKNGLTSNNICINGFKSSYTYTTQSKEIIFDKPVTLTKLCVYGDIGKYGGDIKVYINGKYVGTIKHDNFFDAICIQPVPPTNSSNKRYVPVPNYVCTKYKPACRKEVRWPVLWEEKFVCEWDPNASQKFYPGVKELLDKYEECCAYKNGYIECYPSLCASNKISGLLKAIHSAKVCVSKEQSGYYFYVWEYGTKCAKWGPYQWYDTPPNDKNYTCTREYRCIEYKTYCGKCIRTITKLGTCTKPKYCTRPKYCTRTKYCTRTKYCTRDKYCKKRVCDMMMYFNPFFSPPTIIVPASIKLPLPGKCIASHEEKYKCGTQRYACGTERYPCGTEQYVCGIEKYQCGTEVYTCRKKEKIILYNIEESSCSGECRNRYPKCVKGKYMYKCEKCLQYDPVLVNSYLTPPYYKYNALVGDYKCINNTYQDVKSIRFELSSKIDENDFCGYPFMARLQFYLISANNNTTLKVNNETIKPESVESVDVQATKIEFAYPEKFEGYVLLNVWGEGNFTKNESSALKVREKDGKTLVSPLHAIKRFARNARKKMKSFIDNAQKRCLFPFWPFC

SEQ ID NO: 904 - DNA, 843 bp, Nanoarcheum equitans
gtgctagacaatataagtgctgcgatattaagacagttagattatttatcaaaacattatgaatgggttccgtttgagcaattaaagaaaagactggactataacgaaaaaataataaagaaaaaaataaaagaattgctaagaaaagagtatatccaaggaataccgcatgctaaatataatgaatgggcctttaaaattacttctaaaggcttagacgcgatagctttccatgatttgcaaaagaacaaagtagtaaaaaaattattaaacccaataggtatgggaaaagaagcagaagtgtatttagccttagattttgacgataatcctattgttgtaaaaaagcatttatttgatagggccaaattcaaaaaaatagccaaatccttagcatatgcttctattaaatggagagcaaaacaattgggcaaaaaactatacgaaataaatgtgcccagagcaaaagctcaaatagaatcctatgttttagaaaaactatactacatgggtttccatgtgccaaagcccatatctattaataggcatattgtagtaatggaagctatattagataatggttttcctgcaaagcaattatctaagctaaaacctgacaaagaattgggtttaaagatattggaagaatatgataatatagttaaaaaagccaaaatagtgcatggcgatttaagcccattcaatattttagtaaaaggtggagaatactatttcatagattgggcccaagcggtgcctagcgattatgaagaagcaaatatattatataaaagagatattgaaaacataaaaaaattctttcatttagacgatactatgtga

SEQ ID NO: 905 - protein, 280 aa, Nanoarcheum equitans
MLDNISAAILRQLDYLSKHYEWVPFEQLKKRLDYNEKIIKKKIKELLRKEYIQGIPHAKYNEWAFKITSKGLDAIAFHDLQKNKVVKKLLNPIGMGKEAEVYLALDFDDNPIVVKKHLFDRAKFKKIAKSLAYASIKWRAKQLGKKLYEINVPRAKAQIESYVLEKLYYMGFHVPKPISINRHIVVMEAILDNGFPAKQLSKLKPDKELGLKILEEYDNIVKKAKIVHGDLSPFNILVKGGEYYFIDWAQAVPSDYEEANILYKRDIENIKKFFHLDDTM

SEQ ID NO: 906 - DNA, 1194 bp, Nanoarcheum equitans
atggttttagtaggcatagtaggcaaacccaatgtaggcaaatctacttttttcaaagctttgactttgcaaccagtagaaatagataataggccttttgtgactatagaaccaaacaaaggagttgcatatgttagagttgaagatgtaggcccagaatttggagttatttctaacccaaggcatggttttattaagggcaaatatagatttgtaccaatagaagttatagacattgccggcctagttcctggggcacacgaaggtaaagggctgggaaaccaatttttagatgacataagaaaagctgatggtataataatggttgtcgatgctgttggtgccacggatgaggaaggccatttcgtaggccctggtaaatatgatccattaaaagacataaaatggttagaagaagaattagattattggttttacaatgttttaaaaaggaatatagataaaatcttaagagttgctaaaatagagaagagaccaatagatagagaaatagcaaagataatgtctgggttaaatgtaaatatagaccatgtaaagaaagcttttagagatctaaatttagatagtgaattttatgatttcgatgacgaattgttatttaaattagcacatcttttaagaatatactcaaaaccttttgtaattgctgcaaacagaatagacatagatccagatttggcagaaaaaaacatagaaagaataaaaaaggaatatccattaacaatacctacatcgggatatgcagagtatatattaaaagaattggacaaacaaggtaaaatatcctatatacctggcgaaagtgattttgaaatattaaaacctttaagcgaaaaggagaaaaaagtattggatttcataaaaacaaacatactagaaaggtttggcagtactggggtacaaaatgctttagacactttggttttcgatgttttgaaatatatagcggtattccccgggggtatagataagctaaccgataaagaaggcaatgttttaccggactgctttttattaaaagagggctcaacagtattagattttgctaggaagatacatgaagatttggcaaaacatttcgttaaggctatagatgtaaggactagaaagattttaggaaaagattacaaactaaaacatagggatgttattcacatagtatcgtctaaatga

SEQ ID NO: 907 - protein, 397 aa, Nanoarcheum equitans
MVLVGIVGKPNVGKSTFFKALTLQPVEIDNRPFVTIEPNKGVAYVRVEDVGPEFGVISNPRHGFIKGKYRFVPIEVIDIAGLVPGAHEGKGLGNQFLDDIRKADGIIMVVDAVGATDEEGHFVGPGKYDPLKDIKWLEEELDYWFYNVLKRNIDKILRVAKIEKRPIDREIAKIMSGLNVNIDHVKKAFRDLNLDSEFYDFDDELLFKLAHLLRIYSKPFVIAANRIDIDPDLAEKNIERIKKEYPLTIPTSGYAEYILKELDKQGKISYIPGESDFEILKPLSEKEKKVLDFIKTNILERFGSTGVQNALDTLVFDVLKYIAVFPGGIDKLTDKEGNVLPDCFLLKEGSTVLDFARKIHEDLAKHFVKAIDVRTRKILGKDYKLKHRDVIHIVSSK

SEQ ID NO: 908 - DNA, 1335 bp, Nanoarcheum equitans
atgaaaatagaagtaagagctgtagggggttataacgaaataggcgctaatatgacagctattggaatagatgacgaatggctaataatagatatgggtgtgcatgtcgataaaatgttagcatttcaaaaagaccaagaagaagttgtagaatggaatagggaattattagaaaaaataaacgctttaccaaaaatagagtatatagaggatataaaagataaagttaaggcaatactaattacgcatggccatttagaccatataggagcagtaatacatttggcttatgaatttaatgctccaattatcggcccaccctatgccatagaattaataagatctttcgaaaaggattataaaataatattgccaaacgaaatgaaaaagataaaccttaattcctctatacaaattagcgataaaataagtgtagatttcatttacgcaacccattccataccgcatagcgcccatttggctatacatactccaaaaggagtaatattcttctcgggagattataaattcgacaatttcccagtaatagggcaaaggtataatttagaaaaactgaaagagatagctaaagaaggggtaatattagcatttattgaatccactagggcagacgaagataaaagaagctatagcgagataattgctagggaaatgcttagagatgttttattcgaagagcatgaagggttaataataatgactactttttctagccacatagcgagattaaaatccatggttgaactaagcttagaattggatagagatgtgtatatattaggaagaagtatggtaaaaaatgttgaaatcgctgaaaaacttggaatatacaagtttagcgataaggctaaaatatatcaataccatgaccaaatcgctaggctattaaaaaagattgatgatagatctaaatatgcactaattgttacaggcaaccaaggagagcccggtagcgttctatggaggatggcttttgagaaattcccatttaggttagacaaaaaagatactgttatatttagttgctttacaataccaaatgctataaatattgcttttagaaacctaatagaggaaaaaataaaatcttttggtactagaataataaaagatgtccatgtctctggccatgcaatgagggacgaccattatagactaataaagatactaaagccccaaataataatcccaaaccatggagattttataaaaagaggagcattagcagatttggcgatgaacgaatttggttattctttagggaaagatttatttttaatacaaaatgggcaaagaataaattttgagttctaa

SEQ ID NO: 909 - protein, 444 aa, Nanoarcheum equitans
MKIEVRAVGGYNEIGANMTAIGIDDEWLIIDMGVHVDKMLAFQKDQEEVVEWNRELLEKINALPKIEYIEDIKDKVKAILITHGHLDHIGAVIHLAYEFNAPIIGPPYAIELIRSFEKDYKIILPNEMKKINLNSSIQISDKISVDFIYATHSIPHSAHLAIHTPKGVIFFSGDYKFDNFPVIGQRYNLEKLKEIAKEGVILAFIESTRADEDKRSYSEIIAREMLRDVLFEEHEGLIIMTTFSSHIARLKSMVELSLELDRDVYILGRSMVKNVEIAEKLGIYKFSDKAKIYQYHDQIARLLKKIDDRSKYALIVTGNQGEPGSVLWRMAFEKFPFRLDKKDTVIFSCFTIPNAINIAFRNLIEEKIKSFGTRIIKDVHVSGHAMRDDHYRLIKILKPQIIIPNHGDFIKRGALADLAMNEFGYSLGKDLFLIQNGQRINFEF

SEQ ID NO: 910 - DNA, 462 bp, Nanoarcheum equitans
atggccaaaaaaccctatggagaggtaactaaagatatagtccatatagcggatgtggatttagatggacacaaacctatatatgtagagctaaggaaagttgttggagtaaattggatgtttgcccatgctgtttgtgcagctttaggaattgacaaatggagaaaaattggttctttgagtgatgaagagttagaaaaattggaagacgcattaagaaacccatggaaatatgggataccttcttggttatataatagaaggagagacccagaaactggaaaagacttacatttggtaggaaacgattacaaaattacaatggaattcgatattaaaagggaaatgcaaatcaactcttggagaggttatagacatagagaaggtctccctgttagagggcaaaggactagaagccaccatagaaaaggcagaactgttggggtaataaagaagaaataa

SEQ ID NO: 911 - protein, 153 aa, Nanoarcheum equitans
MAKKPYGEVTKDIVHIADVDLDGHKPIYVELRKVVGVNWMFAHAVCAALGIDKWRKIGSLSDEELEKLEDALRNPWKYGIPSWLYNRRRDPETGKDLHLVGNDYKITMEFDIKREMQINSWRGYRHREGLPVRGQRTRSHHRKGRTVGVIKKK

SEQ ID NO: 912 - DNA, 1197 bp, Nanoarcheum equitans
ttgcgaaaaataaatatgtattatctattactattaggcatattatttatgctttctggttgcgtaaatctaagcaaccaaccccaagtagaaccaataaataatactacggaggaacaaacatattatagttctggtaacgcagtttctataacttatgaaggaaaaaatagttatatggttaacctaggacaaaaaatacccattcctatgagaataaataaccatttgcctattaatttaactaatgacagtgtttatctttttgtggataatgttttatgtagtagggctttgaaatctgaaaagggagtaacaaacacagcaaccagtggaagcaccacttactatatgaataagtttacttttaagaaagatattagcaaagcagtatatgttggtttaaaagagaaaaacactgtgccatattatgtgatgttccaaatagatacttcttatttacaaacacctgaattaactattccgatatatttggttggagtaataggaggcatagaagaatatgaagtatgtacgagagttgctaaacacaaagattccccgatgggtaattgcaatgttggagatgtatcaaaaaaattctctttaccttctgatgttaatacaaatgtgaaaatagaatcgatatacaatgattacaaaattataattaagtttaacaaaaacaacaatgttattccaataaaagatggtaatgatctaaaagacgcccttgttgtgaaagtattattaaatgggcaagacatcacaaaatgttgtaacgtaacgatatcagatggaacacatgatgataaaaacaatacatacaccattaagagttatacttatataaaagattcgggtccatttaatgaggctttggaatgtagtttaactgctaacaatactaaattacaatgtaacgataatgatattgaaggtacagacatagttttaggtaaaaaagcgaaattggatattatctatgcatatccatttagatataaaatagcagagcccacgatatctttgataatgaatgacaaaagttttgagcaatgtgaagatgacaccaatggaactgcaggaaatgttagcgaagtatactcattatacgatttagatgttttgtcttcaggatttgagaataaagcaaaagatgttataaaatctttaaagagttggttatacccctaa

SEQ ID NO: 913 - protein, 398 aa, Nanoarcheum equitans
  signal (1)..(26)
MRKINMYYLLLLGILFMLSGCVNLSNQPQVEPINNTTEEQTYYSSGNAVSITYEGKNSYMVNLGQKIPIPMRINNHLPINLTNDSVYLFVDNVLCSRALKSEKGVTNTATSGSTTYYMNKFTFKKDISKAVYVGLKEKNTVPYYVMFQIDTSYLQTPELTIPIYLVGVIGGIEEYEVCTRVAKHKDSPMGNCNVGDVSKKFSLPSDVNTNVKIESIYNDYKIIIKFNKNNNVIPIKDGNDLKDALVVKVLLNGQDITKCCNVTISDGTHDDKNNTYTIKSYTYIKDSGPFNEALECSLTANNTKLQCNDNDIEGTDIVLGKKAKLDIIYAYPFRYKIAEPTISLIMNDKSFEQCEDDTNGTAGNVSEVYSLYDLDVLSSGFENKAKDVIKSLKSWLYP

SEQ ID NO: 914 - DNA, 384 bp, Nanoarcheum equitans
atggcttacccctaccaagggagagacaatagactaattactgggagaatccatcctagggctagaaaaaagagaaaatatgaattgggtagagaacccacatttactagggtaggagaaaggaaaattaagaaaattagggttagagggggaaatataaagataagattgaaaagagatatgtatgttaatgtgtatgaccctacccaaggaaaaacagtaaaagcaaaaatagttagatttttagataacccctcaaatagaaattttgcgagaatgggtatactaactaaaggggctatagtcgaaacagaattgggcaaagtcaaaataacttctcgtccaggccaagatggtgtattaaatggtgttttgattcaataa

SEQ ID NO: 915 - protein, 127 aa, Nanoarcheum equitans
MAYPYQGRDNRLITGRIHPRARKKRKYELGREPTFTRVGERKIKKIRVRGGNIKIRLKRDMYVNVYDPTQGKTVKAKIVRFLDNPSNRNFARMGILTKGAIVETELGKVKITSRPGQDGVLNGVLIQ

SEQ ID NO: 916 - DNA, 423 bp, Nanoarcheum equitans
atgttcgagaaaaagctggtctttcttagaataatatattatctcataaccgcttatttagtatataagataagcccttacgctataggtttggcttttgtatttgattaccttatactggcttataataatatgcttttcttagccattctaaaaaacataaactttacaagaatccatttaaatagtgcatttttgttttatttaatggttttttatttattcctagttttaattaaaaggccattaccttgcgaaatattttgcgatatgttatatcctatctatgaaacttttttagcaatctttttgctatacaatacagctttgctatttaggaataaaagaacatcaataaaaaagttaagcttttatattgttttgggaataattgttttatggttagaaaggtatttgcaatag

SEQ ID NO: 917 - protein, 140 aa, Nanoarcheum equitans
MFEKKLVFLRIIYYLITAYLVYKISPYAIGLAFVFDYLILAYNNMLFLAILKNINFTRIHLNSAFLFYLMVFYLFLVLIKRPLPCEIFCDMLYPIYETFLAIFLLYNTALLFRNKRTSIKKLSFYIVLGIIVLWLERYLQ

SEQ ID NO: 918 - DNA, 477 bp, Nanoarcheum equitans
atgaaacaatatagtttcatactatttttgattgcttatattttagtaaactatttcttaggaggcaatgttaattggggtttgcttttaatagctattggtgctgtattattgctcaacggtttatccttattattgggagcaatcttaattgatacggaggaaataaaaaaaataaaccaagaattgaaagagatacaaaaaaacccatttttagcattagttaaacaagacaaaatcatagagatttacaacaaaaaacaagaaataatgaaaaaatatatgttcgcaaatatggctttgtttataattggtttatctttgttaggcttattaaagggcaatgtgtgggaaaatttcaaaattgaattgccattcataggaggaacaatatctttgtttttagcatatatagtttttaccttagcattatctcccataatcaacaatgttcgagaaaaagctggtctttcttag

SEQ ID NO: 919 - protein, 158 aa, Nanoarcheum equitans
MKQYSFILFLIAYILVNYFLGGNVNWGLLLIAIGAVLLLNGLSLLLGAILIDTEEIKKINQELKEIQKNPFLALVKQDKIIEIYNKKQEIMKKYMFANMALFIIGLSLLGLLKGNVWENFKIELPFIGGTISLFLAYIVFTLALSPIINNVREKAGLS

SEQ ID NO: 920 - DNA, 621 bp, Nanoarcheum equitans
atgaaaatattatttacatctgacatacataatagcaaaacccttgagaaagaaatcaaaaaagaagcagaaaatgcagatatgattgttatcgctggggatttggttgattatggtggaaattttgatttgaatttatttgaaatcgataaggacttttatattataccaggcaacaacgatcctccagagtttatagaaagattgacagaacaatacagtaatgtccattctattcataaaaaaaggatagactttggcaaatttaatttagtaggcatgggattcgcaacggtaggaccatattttattagtgaagatgaatataatgaaatagagccattaatcgattctaatactatattagtaacgcatgaacatcctgatggtatagattttataccaggttctgtaagattaagggacatacttgaaaacaaagaattgctattgcatatacatgggcatatacatgaattgggaggggaacaatttattataggaaataatttatcaataaatgtggcaaaaactgttacactaatcgatatagataaatggatagagaataaagaaaaattcttaaatgagctaaaggaaaatcaaaatgaaacaatatag

SEQ ID NO: 921 - protein, 206 aa, Nanoarcheum equitans
MKILFTSDIHNSKTLEKEIKKEAENADMIVIAGDLVDYGGNFDLNLFEIDKDFYIIPGNNDPPEFIERLTEQYSNVHSIHKKRIDFGKFNLVGMGFATVGPYFISEDEYNEIEPLIDSNTILVTHEHPDGIDFIPGSVRLRDILENKELLLHIHGHIHELGGEQFIIGNNLSINVAKTVTLIDIDKWIENKEKFLNELKENQNETI

SEQ ID NO: 922 - DNA, 1065 bp, Nanoarcheum equitans
atggtgatggacgatatcctaaaagaggcactagaaacaatgaaagacataaatctatcaaaagcgagagcagcaaacataaaagttgtaggtgtgggcggtgcaggatgcaatataatagaatggctatacaaaaagaagatagagaatgttgatctaatagcaatgaatactgatgcagtgcatttaaaaagtatgaaggttgatcctgaaagagtaaaaagaatacttttaggaccagatattacaaagggccatggtgctggtggtaaaccagaagtcgccgaacaagccgctagagagagtgccaaagagataaagcaattattagaaggggcagacttagtttgggtagttgctggcatgggaggaggtacaggcacaggagcagccccagtagtagcagaaatagcccaaaatgttggagctttagtaacaagtttcgctataaccccatttagatttgaagggagaagattacaaatagcttgggaagggattagaaggttaacagaatttagtaataccacagttatattagataacaataagctattcgaagtagcaagaggtttaaatgtgcaacaagcttttgctttgtctaatgaattggtagcacaaacagtaagtggggtagtagagatagtaactggggccgcagatataaatagagatttagcagacataaaagctattatggaagaaggacatgtcgctgctattggtattggagaatcctctagtgagaatagactaatagaagcagtaactagggccataaaacatccattgttagatgtagatgttaagggcgccaaaggtgctttaatctatataacagcagggccagattttaaaatagatgaactaaaatcgttggaaacatttgttaaaaataatttagacagtaacgcctatgttagctggggtttaaaaataagagaagacttcggcgaaaaagtaagagtaatagcaatagttactggagtaaaaagcccctatataattggtaaagactttatatcaagaaaaaaagatgagtatggaatagataaaattttgtaa

SEQ ID NO: 923 - protein, 354 aa, Nanoarcheum equitans
MVMDDILKEALETMKDINLSKARAANIKVVGVGGAGCNIIEWLYKKKIENVDLIAMNTDAVHLKSMKVDPERVKRILLGPDITKGHGAGGKPEVAEQAARESAKEIKQLLEGADLVWVVAGMGGGTGTGAAPVVAEIAQNVGALVTSFAITPFRFEGRRLQIAWEGIRRLTEFSNTTVILDNNKLFEVARGLNVQQAFALSNELVAQTVSGVVEIVTGAADINRDLADIKAIMEEGHVAAIGIGESSSENRLIEAVTRAIKHPLLDVDVKGAKGALIYITAGPDFKIDELKSLETFVKNNLDSNAYVSWGLKIREDFGEKVRVIAIVTGVKSPYIIGKDFISRKKDEYGIDKIL

SEQ ID NO: 924 - DNA, 2481 bp, Nanoarcheum equitans
ttgttgtgtatgtccgaagaaggaattaaactaaaagtagcagaagcgtaccaagaagatgtatatttaggaaaagtaagagtagactacgatgttctagatagattaggattgtcccccggcgatataatagaaatagaaggaaccagaaaaacctatgctattgctgatgttttatatccagaagaccaaggattaggtataataaggatggatggtgtaataagaaaaaatgctggtgtaggtgtaggagaatatgtaatagttagaaaaccaccaaaaccccaaatagcgaaaaaagtagtattagccccagtaaaaaaggaagaacaaataatcattgacgaatactatttaaggaatttactaaatggcttcgtagtaactaaaggagactatgtagtagttaggtttgataatttaggcttcttcatcgattttctaccattaaaagagatgtggttcaaagtagtttctactaacccaccaaaaggcccagtaataataggaagagatacaataattgaaattaaaccaggaggagtacaagaaataccagaagtaacttacgaagatattgggggaatgaaagatgttatacaaaaggttagggaattagttgaattacccttaagacatccagagatatttgaaaggttaggcatagaacctccaaagggagttctattatacgggcctccaggtacaggtaaaacattattagctaaagcagtagctaacgagagtggagcatatttcattagcataaatgggcctgaaatagtaagtaaatatgttggagagagcgaagcaaaattaagagaaatattcgaggaagcacaaaagaatgcccctgccattatatttatagatgaaatagacgctattgctccaaaaagagatgaagctgttggtgaagtagaaagaaggctagtagcgcaattgttaactctaatggacggtcttaaatctagagggaaagtaattgttatcgctgctacaaatagacctaatgctttagaccccgctttaagaaggcccggtagattcgatagagaaatagaagtacctgtcccaaatgaagaagctaggtatgaaatattgaaagtacatactagaagagtcccattgggtaaaagagtagtagaaaaagtagatggcaaaacagttgaaaagtatgtgccattaactaaagaggagaaagaacaattgttaagaaaattagcagcaatgacgcatggtttcgttggggctgatttggcagccctagttaaagaagcagctatgaacgctattagaagagtaataccagacatattagctttaaaagaagagaaattgcctaaagaattattagaaaaattaatggttactgaagaagacttcaaagaagcattaaagatggttaccccttctgcgatgagagaattctatatagaaataccaaaggttaaatgggaagatattggtggtttagaagaagttaaacaagaactaagagaaactgtcgaatggcccttgaaatatagaatagaagaattgggtatcaaacctccaaaaggtgttctattatatggtcctcctggaactggtaaaacattgttagctaaagctgctgctagtgaaagtggggctaactttattgcagtcaaaggaccagagatattgaataaatgggttggtgaaagcgaaagagccataagagagatatttagaaaggctaaacaagctgctcccgctattatatttatagatgaaattgatgccattgccccagcaaggggtagcgatgttaatagagtaaccgataggatagtaaaccaattattaacagaaatggatggcattaccgataggggagatgttattgtaattggcgcaactaatagaccagatatattagatccagcattgctaagacctggtaggtttgatagggttatatatgtaccaccaccagacaaaaaagctagagtagagatattcaaaatacatgctaggaaaatacctaaagaccctgagctaaaagaaagatttgaagagttcaagaaaaacttagagaaactaaaggaaataaaacccgatatagatatagaaaaatacaagaacttgtcattagaggaagcgttagaattatataagaaatccaaggaatttagagatatagtagatacagtattgttctatataccattggcagaaaaaactgaaggatatactggagcagacatagaagcagtagtaagagaggctgtaatgttagcattaagagaattgttcgaacaagctaaaaaagaaaaatgggatgacaagaaaataaatgaaatgattggaaaactaaaagttaaaatgaaacatttcgaaaaagccttagaaaaagttggaccaagcgtagataaagaaactataagagcatacgaagagtttgccaaaaactttaggaaaagaataaacaaaaagaacaacccctacttaggataa

SEQ ID NO: 925 - protein, 826 aa, Nanoarcheum equitans
MLCMSEEGIKLKVAEAYQEDVYLGKVRVDYDVLDRLGLSPGDIIEIEGTRKTYAIADVLYPEDQGLGIIRMDGVIRKNAGVGVGEYVIVRKPPKPQIAKKVVLAPVKKEEQIIIDEYYLRNLLNGFVVTKGDYVVVRFDNLGFFIDFLPLKEMWFKVVSTNPPKGPVIIGRDTIIEIKPGGVQEIPEVTYEDIGGMKDVIQKVRELVELPLRHPEIFERLGIEPPKGVLLYGPPGTGKTLLAKAVANESGAYFISINGPEIVSKYVGESEAKLREIFEEAQKNAPAIIFIDEIDAIAPKRDEAVGEVERRLVAQLLTLMDGLKSRGKVIVIAATNRPNALDPALRRPGRFDREIEVPVPNEEARYEILKVHTRRVPLGKRVVEKVDGKTVEKYVPLTKEEKEQLLRKLAAMTHGFVGADLAALVKEAAMNAIRRVIPDILALKEEKLPKELLEKLMVTEEDFKEALKMVTPSAMREFYIEIPKVKWEDIGGLEEVKQELRETVEWPLKYRIEELGIKPPKGVLLYGPPGTGKTLLAKAAASESGANFIAVKGPEILNKWVGESERAIREIFRKAKQAAPAIIFIDEIDAIAPARGSDVNRVTDRIVNQLLTEMDGITDRGDVIVIGATNRPDILDPALLRPGRFDRVIYVPPPDKKARVEIFKIHARKIPKDPELKERFEEFKKNLEKLKEIKPDIDIEKYKNLSLEEALELYKKSKEFRDIVDTVLFYIPLAEKTEGYTGADIEAVVREAVMLALRELFEQAKKEKWDDKKINEMIGKLKVKMKHFEKALEKVGPSVDKETIRAYEEFAKNFRKRINKKNNPYLG

SEQ ID NO: 926 - DNA, 516 bp, Nanoarcheum equitans
ttgtctccctctaaattaatagaagagatattaaacaaattagagagctgggaaaagaattatgagtatactttgaatttttctggcgcaatagagataaaagatttgatagatatagtgaaaaacgctttgggcaaatcaatggtagaacaaaaacctatattggctatcccatttgttgaatataaagaaatggtctttcaaggcaaaagatattatagaattagtattctaacaaaaggcaatagagatagcgtaggaaatgccaaactatatagtgctttctatatacaaattagagttgatggttatgatactaagggcgatatttctgttacaataaaaaattatactaaaaagaaagaccctgaaataaaaattccagtattaaatgaattttataaaaaatactacgagaagcaagtagaagatgaatacaaaatgttaaaggacaatgaaaaagccgtgttagtagaaatatacaataaactaaaagaaaaaatttatcctaagtag

SEQ ID NO: 927 - protein, 171 aa, Nanoarcheum equitans
MSPSKLIEEILNKLESWEKNYEYTLNFSGAIEIKDLIDIVKNALGKSMVEQKPILAIPFVEYKEMVFQGKRYYRISILTKGNRDSVGNAKLYSAFYIQIRVDGYDTKGDISVTIKNYTKKKDPEIKIPVLNEFYKKYYEKQVEDEYKMLKDNEKAVLVEIYNKLKEKIYPK

SEQ ID NO: 928 - DNA, 852 bp, Nanoarcheum equitans
atgttcttaattagggccaaagagaaaggccaagttgaggattccttttatataaccccatcaaacaaagaccaactattgcaagcaatactagataatgtaaaagtaaaaggtaaaaaacttggagatttgctaaaagagttatttaatgacgaaccattggtagcggatatagcagtatatgtatttgatgaaaagagcaacaaatatgaagggcatgtaactataatagagaatacaatttctgacatatacttaaataagatgcctgaaggagactattttttggttatacccattaaactaagggcattagataaggaatttgaattagataggttaaatgaaataattcctattggggtaaggaaaaagattaattttaacatagatttggaacaaaagaaagaagaaccaaaagtagaacctaaaaacgatatcgaaggtatattaacaaagcatggatatacaataataaagaaagatggcttaactataggtaagaaaatagtgatgggtgtaccagtatatgtagtattatatagcgatatattggataatgaaaaaattgcaacctttttaggaaaattagaattattaggaataagcccaaatataaagatattccatgccaaagaggttaaagcagagccaaacatactaaaaactaaaggcatatttgttgtccaatccttaagcgaaatagatgctatattatattccctaagcaacgccaatgaaaaaataacaaaacttaaaaagtatatagaagtattttataaaaagtttgccgaatatgaatctaagttgcacgagctaaaagaaatagcaaaacaaattgtctccctctaa

SEQ ID NO: 929 - protein, 283 aa, Nanoarcheum equitans
MFLIRAKEKGQVEDSFYITPSNKDQLLQAILDNVKVKGKKLGDLLKELFNDEPLVADIAVYVFDEKSNKYEGHVTIIENTISDIYLNKMPEGDYFLVIPIKLRALDKEFELDRLNEIIPIGVRKKINFNIDLEQKKEEPKVEPKNDIEGILTKHGYTIIKKDGLTIGKKIVMGVPVYVVLYSDILDNEKIATFLGKLELLGISPNIKIFHAKEVKAEPNILKTKGIFVVQSLSEIDAILYSLSNANEKITKLKKYIEVFYKKFAEYESKLHELKEIAKQIVSL

SEQ ID NO: 930 - DNA, 354 bp, Nanoarcheum equitans
ttgaggcgtagcagtatatttacattagtcttttacgccctagttggggctactgctatcaatgttgtttaccatctaattaatgtgctaaaaactatatctaatgatgttcaaaaaaatttggctattgctaatttttatcgaataaacgctttggctttatatgttaataaaactggtaaagctatagaaactgatttaggagattgcaccatacatggtaaaactaatagtttgttagtatattgtggaaatttctattaccaagggaaaaccccaataaaaatagtagggataggaaaaggccatataaaaataataccaaaagaagattatctattgattagtaaataa

SEQ ID NO: 931 - protein, 117 aa, Nanoarcheum equitans
  signal (1)..(19)
MRRSSIFTLVFYALVGATAINVVYHLINVLKTISNDVQKNLAIANFYRINALALYVNKTGKAIETDLGDCTIHGKTNSLLVYCGNFYYQGKTPIKIVGIGKGHIKIIPKEDYLLISK

SEQ ID NO: 932 - DNA, 705 bp, Nanoarcheum equitans
atgcccacctatattaagagacatctaagaagcttagctgtaccaagaacttggccagtccctagaaagagtaggggttattggatcgttaaaccatctcctggtccccattctaaagagtttgcaatgcctatcgctgtttggcttagagattatttaggattggcagaaaacatgagagaagttagatatttgttaaacaatggcaaagtattagtagatgggagaccaataaaggattataaattcccagtaggattgtttgatgtactagctatccctgaaattaacgagtattatagagttttgctagatgaaaggggaaaactttatttgaaaaaaatagataaagaggaagcaaacataaaatatggcaaaataataagaaaagttagtgttaggggaggaaaaatacaatacactttaacagatggtagaacatttttaggagataattcatataaaactcactatggtgtagtatatgaaattccgaatttcaaaattagagaagtaattccattggaaaaggacagaaaagcttatataataagaggaaagcacactggtaggattggagtaataaaagaagtaataaaaacagacatgccctggccaaacatagtacgattagaagttgcaggcgaagtaggagagacatggttagacaatataattccagtcccagaaaattttgaggcgtag

SEQ ID NO: 933 - protein, 234 aa, Nanoarcheum equitans
MPTYIKRHLRSLAVPRTWPVPRKSRGYWIVKPSPGPHSKEFAMPIAVWLRDYLGLAENMREVRYLLNNGKVLVDGRPIKDYKFPVGLFDVLAIPEINEYYRVLLDERGKLYLKKIDKEEANIKYGKIIRKVSVRGGKIQYTLTDGRTFLGDNSYKTHYGVVYEIPNFKIREVIPLEKDRKAYIIRGKHTGRIGVIKEVIKTDMPWPNIVRLEVAGEVGETWLDNIIPVPENFEA

SEQ ID NO: 934 - DNA, 1524 bp, Nanoarcheum equitans
atgcccattatttctatagacaccaaatatcttaaggacaaatttgatttagatttagaaatagaggatttgccaaaaatcaaagcagaattagacagcattgatggaaatatctggaaaatcgaagtcaaagacacagaaagaatagacttatggagcgtttttgggatagcaagagagctaaaaggaataaaaggaatagaagagggcttgccagactataagataaaagaaggaaattatgttttatacaattattctaggaatagaccatatgtcgcagccgcagtagtaagaaatgtatcaatggataaagaaacattgaaatacataatacaaatgcaagaaaccttagcaaaaaactatgggagagatagaaaatatgttgcgattgggatacataatttcaaaatgataaaattccccttgtattataaagaagtagatcccaatacaaagtttgttccattaggctataacaaagagctaactttaaaggaaatacttgaaacggaaaaaggcaaaaaatataaacatttagttaaatattatgaagtattaatggatagcgaagggaaaatattgagtttccccccaataataaattctaatacagttggtagaattagagaagatacaaccgatttgtttatagatgtgacaggtatagatgaaagaagagttcatagaacgttaaacgcaatagttgctaacctattagaaatagctgagtatgctgaaacagttaaaataataaaaaacaacgaagagaaagtatataaaatagaaaaaagaacaatggaagtaaattggaaagacattgaagattggttaggtataaaagttgaacccgaactattaagaaaagcaagatatgacatagacggtaataaagttagttggttaacctataggtttgatatatatgatttcacagacatagctgaggattatatgataattaaaggatacgattatttgccttaccaagaatacaaatcacatgggcaattcaataaaacaatacaattatataatgatataagaaaattattgttgggcttaggagccacagaagtttataccattgctttaacagacaaaggaataatcccaataaagaatccagttagttctaattattcctatctaagagacagcttaatacacccattattaaagtttttggcaaacaatcaatataaagcccctatagaaatatttgaatttggtagaatatatagagaaaaaccatattggagtatagtatatttgtctctttcagaggatagtgattacaataaagcagcatcaaaattagctttcctattaaaagagttaggtattaattacgaaataaaagaagggaaacataaatactttttagaaggtagaacagcagaatttgttaatgataaatttaaggcctatgctggagaaatagaccccaatgtgttagaaaaatatggtatcgttttccccgtaagcgggttcgagattattatggaaaacctaaatttataa

SEQ ID NO: 935 - protein, 507 aa, Nanoarcheum equitans
MPIISIDTKYLKDKFDLDLEIEDLPKIKAELDSIDGNIWKIEVKDTERIDLWSVFGIARELKGIKGIEEGLPDYKIKEGNYVLYNYSRNRPYVAAAVVRNVSMDKETLKYIIQMQETLAKNYGRDRKYVAIGIHNFKMIKFPLYYKEVDPNTKFVPLGYNKELTLKEILETEKGKKYKHLVKYYEVLMDSEGKILSFPPIINSNTVGRIREDTTDLFIDVTGIDERRVHRTLNAIVANLLEIAEYAETVKIIKNNEEKVYKIEKRTMEVNWKDIEDWLGIKVEPELLRKARYDIDGNKVSWLTYRFDIYDFTDIAEDYMIIKGYDYLPYQEYKSHGQFNKTIQLYNDIRKLLLGLGATEVYTIALTDKGIIPIKNPVSSNYSYLRDSLIHPLLKFLANNQYKAPIEIFEFGRIYREKPYWSIVYLSLSEDSDYNKAASKLAFLLKELGINYEIKEGKHKYFLEGRTAEFVNDKFKAYAGEIDPNVLEKYGIVFPVSGFEIIMENLNL

SEQ ID NO: 936 - DNA, 423 bp, Nanoarcheum equitans
ttgatattttcaacaatggctaaggaattcagatacaagggatatactttacaagaattagagcaaatgtctttagaggaattagctaaaataatgcctgcaaggcaaaggagaaccttattgagaaggctaaagtttggatggagtgaccaacaaaagaagctattcaagaaaatattgttagcaaaagaaggtaaatacaaaaaaccaataaaaacccacgctagaaacacaataatattgccatttatggttggtgttacagtacatgtctacaatggaaaagaatatgtcccagttcaaataaaaccagagatgataggccattatttaggggaattcagctttactactaagagacccaagcacagcgccccaggtataggtgcaacaaggtctagcgcgcacgtatctaagaagtaa

SEQ ID NO: 937 - protein, 140 aa, Nanoarcheum equitans
MIFSTMAKEFRYKGYTLQELEQMSLEELAKIMPARQRRTLLRRLKFGWSDQQKKLFKKILLAKEGKYKKPIKTHARNTIILPFMVGVTVHVYNGKEYVPVQIKPEMIGHYLGEFSFTTKRPKHSAPGIGATRSSAHVSKK

SEQ ID NO: 938 - DNA, 711 bp, Nanoarcheum equitans
ttgcaaaaagctttacaaatggcatccaaagttattaggaaattcatccaaaatgcaaaacttacagtatttagccaggaatttattaggctatacttaaggggcgctaatgtatctaaagtaataataagacaaacccctatagttaatagagtaataatttattctgccagaccaaagatgattagtgaagagagaaaagcccatttggctaaactattagaattgaaattcgggttagaaaaaccagtaatagaagtattacccatagaaaatcccaatttagatgcacatgtcattgctgaaaggttagccatgggtatagaaagaaacataagagcctatagaaggttagcacaaagatatttagaaacaataatgaatgctggtgctataggagcagagatagtaattgctggtaggctatccggacaaagagggaaaacatggcgtttcaaagccggcaatctaagaaaaaccggaacaataggccaattcgaattggatagggcatttaacatagcatatttgaaacctggtgtagcaggcatacatgttacaatactaaaaccagatgccgagataccagatataatagagtttaaatcccctgaagaaatctctatagaagaaatagaaaaaatcgataaagagatcgcggaaaagatgaaaaaatatttggaaacttatttattagcgaaacaaatgtag

SEQ ID NO: 939 - protein, 236 aa, Nanoarcheum equitans
MQKALQMASKVIRKFIQNAKLTVFSQEFIRLYLRGANVSKVIIRQTPIVNRVIIYSARPKMISEERKAHLAKLLELKFGLEKPVIEVLPIENPNLDAHVIAERLAMGIERNIRAYRRLAQRYLETIMNAGAIGAEIVIAGRLSGQRGKTWRFKAGNLRKTGTIGQFELDRAFNIAYLKPGVAGIHVTILKPDAEIPDIIEFKSPEEISIEEIEKIDKEIAEKMKKYLETYLLAKQM

SEQ ID NO: 940 - DNA, 420 bp, Nanoarcheum equitans
gtgccaacttctaaacagattataaataaaaagcaagatgaggttagtgacatttatggaaaggaaatgattagagtaattagatccctgttaaagcataagattattgatacagaaagtctatccaaaaaaacaggttatagcataaacacagtaaggagagcattgtatacattacaaaaaatgggtatagttcgttacataaataaagaagacaaaaccctatggcaattgttagaaaccgattatgagaaaatactagatactctgttagagccatacaaaaaagaagaaaaagccgaaacaggagaattattatttatatgtccaaagtgcggtaggaaatatacattagacgaagcagagatgtacgaatttagatgtcctgaagacggaactcttttggttgcgaaccaatga

SEQ ID NO: 941 - protein, 139 aa, Nanoarcheum equitans
MPTSKQIINKKQDEVSDIYGKEMIRVIRSLLKHKIIDTESLSKKTGYSINTVRRALYTLQKMGIVRYINKEDKTLWQLLETDYEKILDTLLEPYKKEEKAETGELLFICPKCGRKYTLDEAEMYEFRCPEDGTLLVANQ

SEQ ID NO: 942 - DNA, 306 bp, Nanoarcheum equitans
atgaacaaaattcttgctgctttaagctatttaaatatttttctttggataattatttattctttgtttaaggacgacccttatattaatagccatttaaaatacgcattaatagtaaacctgataggaataatacaatttctattaggaataagcggtttatattttgtttcttaccccttattgatattttatctaattattttaatttatggaatagttaatgctttgttaggaaatgatagcccggaatatttgcaaaaattgtatgagccattttctaattatttggatcaatatttttaa

SEQ ID NO: 943 - protein, 101 aa, Nanoarcheum equitans
MNKILAALSYLNIFLWIIIYSLFKDDPYINSHLKYALIVNLIGIIQFLLGISGLYFVSYPLLIFYLIILIYGIVNALLGNDSPEYLQKLYEPFSNYLDQYF

SEQ ID NO: 944 - DNA, 513 bp, Nanoarcheum equitans
atgagcttcaacctaaatattccatttggtaaaaaaagaaaagaagaagaaaatttaatgtcaatgaaagatgatatatttgcagagcacaatatgccagtgcaaccaccacaacccccacagcagccaatgccaatgcaacaattgccccaaccacaaatggaagaaaatttagatgaaaaaattaatgaattaatagagaaatacttagaagaaaagtgggaagttgtttcgcaattcttacaagatttaaaggcatggaaattaagtgtggacaaagaaattaaatctctaaaagaagaagtagaaaaattaaaagccagggttgatgaaatagagaatggttctcaacaaaagttaaatgaagtagcaagaagtataatggatctaagcgcagatataaaggcgatggaaagagtattacaacaaatgttgccagacttggttagctctgttagagagttaagcaaaatagtttcagaactaaaaagtataaaaaatagccaactatag

SEQ ID NO: 945 - protein, 170 aa, Nanoarcheum equitans
MSFNLNIPFGKKRKEEENLMSMKDDIFAEHNMPVQPPQPPQQPMPMQQLPQPQMEENLDEKINELIEKYLEEKWEVVSQFLQDLKAWKLSVDKEIKSLKEEVEKLKARVDEIENGSQQKLNEVARSIMDLSADIKAMERVLQQMLPDLVSSVRELSKIVSELKSIKNSQL

SEQ ID NO: 946 - DNA, 462 bp, Nanoarcheum equitans
atgaagctaacgaaagagatttatgaaaaatatttaaaaaactgggaaatagcagttcgctatttggatgcggacgaaatagaattagcaaaagaagacgaaaaaattttggttttaacattagctaggagggccaatagcaaaatagacataataatagatgaaatagaaacaattttattgccttcagaagagatatcggtaatacatgagctaagggcttttagcaataaagacattgaatggttattagaactatacaggcttgcttcctattattcaagagcaataaagtatggcttatattttaaagatatagattatttaaaacaaacaatcaatgaattgctagaattctataaagagaaagaaccccaattaagagagctatttgctaggaaaagagatatatggaaagaaccaataaacaaaagccaatacgattttagatattttctatag

SEQ ID NO: 947 - protein, 153 aa, Nanoarcheum equitans
MKLTKEIYEKYLKNWEIAVRYLDADEIELAKEDEKILVLTLARRANSKIDIIIDEIETILLPSEEISVIHELRAFSNKDIEWLLELYRLASYYSRAIKYGLYFKDIDYLKQTINELLEFYKEKEPQLRELFARKRDIWKEPINKSQYDFRYFL

SEQ ID NO: 948 - DNA, 927 bp, Nanoarcheum equitans
ttgctcgtctctacgctgttcaatagttttttaattttagtttctttattttttctcttatttggagcagacaaatttttagaaagcggagagagaataagtaaatctctaggcatagatgatagattattggggttaattttagttagtatatccacatcattaccagaattggctgtagcaatattagcagctttagataacaaatctgaaatagttttaggagacattattggaagtaattttgctaacctaggattaggtttagggatcggtttaataattagtccattagttataaaaaaggaaactctatttaacgaagtccccatacatggagcaataaccttagctacattattactaatactaaatgatagtgttttggacaaatatgaagcattaacaatattgattttctttgctcttatgttgttaaacatatacaaagatggaataaaatcaaaagaaaagcaaaaattacattggaaagatttggcttattttgttggctctttagcattagtaataataagcgctaaaattttaataaatagcacaatagtattggcaaaaaatctaaatctaatgccttatttagtaagctctctggtaattgctataggcacatctttgcctgaaataactgtaagtataatatcttctctaaaaagaaaaataaatattgccttgggcgatgtgttaggaagtaatatatttaatatgggagtaattttaccgatcgccacaataattaatcccatacatgctaacataatagttataaaccatctatttttgctattgttgctcactacttatttgactctctcagcatatgttaaaagaaaactaactaagatagatggattaattctattaatagggtacatattatttttaaccttatttatttctaaagcctaa

SEQ ID NO: 949 - protein, 308 aa, Nanoarcheum equitans
  signal (1)..(22)
MLVSTLFNSFLILVSLFFLLFGADKFLESGERISKSLGIDDRLLGLILVSISTSLPELAVAILAALDNKSEIVLGDIIGSNFANLGLGLGIGLIISPLVIKKETLFNEVPIHGAITLATLLLILNDSVLDKYEALTILIFFALMLLNIYKDGIKSKEKQKLHWKDLAYFVGSLALVIISAKILINSTIVLAKNLNLMPYLVSSLVIAIGTSLPEITVSIISSLKRKINIALGDVLGSNIFNMGVILPIATIINPIHANIIVINHLFLLLLLTTYLTLSAYVKRKLTKIDGLILLIGYILFLTLFISKA

SEQ ID NO: 950 - DNA, 465 bp, Nanoarcheum equitans
atgtcgagattgcatgcccataaaagatatcatgggcaatccggtagtaagaggccattaagaactacaaagcccgaatgggccccatatgataaagaattcgttgaaaacaaaataatagagttggcaaaacaagggtattctccagcaatgatagggttaatattaagagaccaatatggtatcccagatgttaggctttatataggaaaaagcttacaagactttttagaggaaaaaggtttattgccagatataccatgggatttgatttatttattaaaaagggcttatagagtgtataaacatatagagttaaaccccagagacacacaagcgaaaagaaattaccaattaattatttccaaaatacatagattggccaaatactataaaagaaaaggggttttgccaaaagattggaaatattcaatagaaattgctcgtctctacgctgttcaatag

SEQ ID NO: 951 - protein, 154 aa, Nanoarcheum equitans
MSRLHAHKRYHGQSGSKRPLRTTKPEWAPYDKEFVENKIIELAKQGYSPAMIGLILRDQYGIPDVRLYIGKSLQDFLEEKGLLPDIPWDLIYLLKRAYRVYKHIELNPRDTQAKRNYQLIISKIHRLAKYYKRKGVLPKDWKYSIEIARLYAVQ

SEQ ID NO: 952 - DNA, 357 bp, Nanoarcheum equitans
atggttaaaccaacaggccctaccgatgttaatgtaagaaaactaattaggcaattagaaaaaacaaaaagacccatatttaaatatatagcggaattgttatcaaaaccaaaaagaaggaaaaaacattttgttgttaatttatggaaaatagagaaacattctaatgatggagatactataatagtgccaggcaaggttttaggctctggagagttaacaaaagatgtaaaagtcgtagcattatcctttagccaaactgcattagaaaaattaaaagacaaagctatatatttagaaaattttgttgaacaagctaaggacaaaaaattgcccaatactaaaattctaatatag

SEQ ID NO: 953 - protein, 118 aa, Nanoarcheum equitans
MVKPTGPTDVNVRKLIRQLEKTKRPIFKYIAELLSKPKRRKKHFVVNLWKIEKHSNDGDTIIVPGKVLGSGELTKDVKVVALSFSQTALEKLKDKAIYLENFVEQAKDKKLPNTKILI

SEQ ID NO: 954 - DNA, 1407 bp, Nanoarcheum equitans
atggtagaaaggatagtcctaacattcatagctataattgggagcatacagattttgaaagaacatttaaatttaatctatacctctgcaatcgcttattctctaattcctattctaattgtatcctatacattatcaaaagaagtatattctttgcatgaagcactttataagaagcacaaattattgggatttttggcccagtggttctctattctattgcttagctctttggccgcagcagcgattaaagatcatcatgcatggataataatattgctattctcactaatctatttgatagatgaaagtatctttttagaattcttagcattgctaggcataatatcttttttaattccaggtttagaacaaactccctttatagttataacagagccaacaatcattatttttagtatatatgtaacattgaaaactctacttaactgggatgtttcttatattatgaggacaacaaaatttttaccaatactattggttttaggtataatagttggatctataaccaaaggcatatcgtatttaacattaattgtgtctgctttgatttggctatacacaagcgcaaaaattttttataataacaaaatcgcctttctcgcaattattggtttagcttttttcttatctctgttagatacgcataccatattagtaacaactagcatagcaatatatgtaatgctaataatatatttcttattcaaaagcaaacttcaaaaattggttggcctatttttagcattaataattgggtatgttgcccttcgatataatataatacaacaagcgtttttacctttggtaacctacactttattgggtttaatagtctatgcaatattaaacataaaagataaagcaattgtaagctttttacataacgcgtttttctttttaattgcccttagcgaaccattatggaaagatccttcgtatctatactatataagagataaaagaagagtattagaagtaggttttggtacaggctatattaccaaacatttaaacaaaaaccatgaagtcgatggtagtgagataagtattatagaattgtttttcgctaaacttagatttttattttcaaagaaaaaaccttatctattcttagatgaaaaagataggattagtattaacaaaaaatacgatgctattgtggggtatggagtaataggatatataaaagatataaaaacttttgctagagatattgttaatcatttaaatgaaaatggcaaaattttatttgttgatttctcaaaagaagatttggatagactatcaaaagagctagaaaagcttggcgtaaaaactcaaatagaaataaaaaacaaaaaactatggcgagaatatatcttaaagggtataaaggtgttataa

SEQ ID NO: 955 - protein, 468 aa, Nanoarcheum equitans
MVERIVLTFIAIIGSIQILKEHLNLIYTSAIAYSLIPILIVSYTLSKEVYSLHEALYKKHKLLGFLAQWFSILLLSSLAAAAIKDHHAWIIILLFSLIYLIDESIFLEFLALLGIISFLIPGLEQTPFIVITEPTIIIFSIYVTLKTLLNWDVSYIMRTTKFLPILLVLGIIVGSITKGISYLTLIVSALIWLYTSAKIFYNNKIAFLAIIGLAFFLSLLDTHTILVTTSIAIYVMLIIYFLFKSKLQKLVGLFLALIIGYVALRYNIIQQAFLPLVTYTLLGLIVYAILNIKDKAIVSFLHNAFFFLIALSEPLWKDPSYLYYIRDKRRVLEVGFGTGYITKHLNKNHEVDGSEISIIELFFAKLRFLFSKKKPYLFLDEKDRISINKKYDAIVGYGVIGYIKDIKTFARDIVNHLNENGKILFVDFSKEDLDRLSKELEKLGVKTQIEIKNKKLWREYILKGIKVL

SEQ ID NO: 956 - DNA, 942 bp, Nanoarcheum equitans
atgttccgtataagtaggacaagctttaagccattagacaaacaatgggacgttataataattggaggggggccagcaggggttgtggctggtttatatagcgctaggtatggacttaaaacattactaatatcgccagataaaggaggaatgttaacagaagcatcttttatagagaattaccccgggttcatatcgatttctggtccagatttagcggaaaggctattcgagcaatatgaaaaaaatgggggacattatttaaaagacaaagtaagtgatattaaaaaggataaaaactttattgtaattaccgaaggtggttacgaattggaagcgaaagcaattatattagcaacaggctccaggagaaggaaattaaatgtgaaaggggaaaacctaccaggggtatcctattgcgctgaatgtgatgctccattatttaaagggaaaactgttgccgtcgttgggggtggtaacacagctttccatgacgctttagttttatctaattatgcaaataaagtttatctaattcatagaagagaccaatttagggcagaaagttacttagttgaaaatgcaaagaaaaaagataacatagagtttatattaaatagtgtagtaaaagaaataagaggacaaaacaaagttgaatccattatagtgcaagataaagaaggcaatacaaaagagctaaaagtagatggggtttttgttgctattggtatggaaacaaacatagaattagctaaaaaattaggagtacaactagacgagagaggaaaaataatagtcgatagatgtcaaagaactaatatacaatatgtatatgctgcaggtaacattactaacaattgttgcgatttagatcaaatagttacatctatggcacaaggcgcaattgctgctaaatccgcttatgaagatttgctaaaatag

SEQ ID NO: 957 - protein, 313 aa, Nanoarcheum equitans
MFRISRTSFKPLDKQWDVIIIGGGPAGVVAGLYSARYGLKTLLISPDKGGMLTEASFIENYPGFISISGPDLAERLFEQYEKNGGHYLKDKVSDIKKDKNFIVITEGGYELEAKAIILATGSRRRKLNVKGENLPGVSYCAECDAPLFKGKTVAVVGGGNTAFHDALVLSNYANKVYLIHRRDQFRAESYLVENAKKKDNIEFILNSVVKEIRGQNKVESIIVQDKEGNTKELKVDGVFVAIGMETNIELAKKLGVQLDERGKIIVDRCQRTNIQYVYAAGNITNNCCDLDQIVTSMAQGAIAAKSAYEDLLK

SEQ ID NO: 958 - DNA, 690 bp, Nanoarcheum equitans
atgagaacaaaagtaggattaattttgtttgccttaccaatagtgccagcgttggcagcaacatgcaatgggccatatacttcacaaccgtccgtttattgtccttatacaaaatggacagaactttggtttgtaaataatgaagctaatttcaaaactgctttagcaaaatggattgacggaacaaaacaaatactaataagtgctacccaaggtataaaattgtacgatgggacttataatttatatataacatataattatataaagctttctagctctagcgattattggagcctatccagtactaatgcagcattctatgtcccaatgtatgtttataactctctaactgccaatagtttaaatgtaaacggcaatgctcaaataaatggggatgttacagctaataatttggcggttaataatacagtaacaacaaaagatttgtctgtatctaatagtgcaactctaaatagtgttactgtaaatggtaatgctgtattcaatgaaaaaacaactttcaataaagaaataacagtcaaagccacttctgatgggaatggttatatatatgtaacagaatacaccgatggaactaatacatatccagcaataaaactatgttatggcagttcatgcgcttatatatactacgacggaaataatgtaactattgttaaccaataa

SEQ ID NO: 959 - protein, 229 aa, Nanoarcheum equitans
  signal (1)..(19)
MRTKVGLILFALPIVPALAATCNGPYTSQPSVYCPYTKWTELWFVNNEANFKTALAKWIDGTKQILISATQGIKLYDGTYNLYITYNYIKLSSSSDYWSLSSTNAAFYVPMYVYNSLTANSLNVNGNAQINGDVTANNLAVNNTVTTKDLSVSNSATLNSVTVNGNAVFNEKTTFNKEITVKATSDGNGYIYVTEYTDGTNTYPAIKLCYGSSCAYIYYDGNNVTIVNQ

SEQ ID NO: 960 - DNA, 945 bp, Nanoarcheum equitans
atgaaagtattgggaatagaatgtactgcccacacatttggggttgggatatttgatagtgaaaaaggtgttttagccaatgaaaaggtaacttacaagggctatggtatacatcctagagaagcagcagaattacatttaaaagagtttgacaaagtattattaaaagcattagaaaaagccaacattagtttaaaagacatagacttaatagctgtttcctctgggcctggtttattacctacattaaaattaggcaattacatagcagtatatttaggaaaaaaattaaataaaccagtaattggggtaaaccatatagtagcacataatgaatttgctagatatttagctaaagcgaaagacccattgtttgtatatgtatcaggagcgaatacccaatttttagcaatagtaaataacagttggtttttggttggagaaactttagatatgggggtaggcaatttaatagacaaagtcgctagagatctaggattagaattcccaggaggaccaaaaatagaggaattggcaaaaaaaggtaaaaatttaatcgaattgccttatacaataaaaggtttgaacttacaattgggaggaatttatacatacataaaaagaattaaagatcaatatagcaaagaggacatagcatactctttacaagagtgggtatttgctttaatattagaaatagcagaaagagccatgcatatgttagataaaaaagaattaatactaactggaggggttgcatgcaacaatagactaaacgatatggcagaacaaatggctaaagaaaataattttaaattctatagattgccttgccaatatttaacagacaacggagcaatgattgcttatttagggtattattggtatagccaaggaatatattatgaaccaaaacccagaccttattggaggatttggatttaa

SEQ ID NO: 961 - protein, 314 aa, Nanoarcheum equitans
MKVLGIECTAHTFGVGIFDSEKGVLANEKVTYKGYGIHPREAAELHLKEFDKVLLKALEKANISLKDIDLIAVSSGPGLLPTLKLGNYIAVYLGKKLNKPVIGVNHIVAHNEFARYLAKAKDPLFVYVSGANTQFLAIVNNSWFLVGETLDMGVGNLIDKVARDLGLEFPGGPKIEELAKKGKNLIELPYTIKGLNLQLGGIYTYIKRIKDQYSKEDIAYSLQEWVFALILEIAERAMHMLDKKELILTGGVACNNRLNDMAEQMAKENNFKFYRLPCQYLTDNGAMIAYLGYYWYSQGIYYEPKPRPYWRIWI

SEQ ID NO: 962 - DNA, 1050 bp, Nanoarcheum equitans
atgaggaaagcagatttagcgaaaggcaatacatgtttggcttgcgctagaaaatgtaaactattcgaaggagcagtaggtttttgtggggtaagaaaaaacatcaacaacactatatatgtattaaactatggacggtttgttgcattcaatatagaccctatagagaaaaaacccctatatcatttttaccctggaaatgttgctttttctttgggcacaacaggctgttcttgggcatgtaaatattgtataaactatgacatttctcaaagaagacaaatagttggcacttacatatcaccagaagagttattagatattgtgctaaactattctcaaaaattgaatgcagaacctatagttacttttacttacaatgaaccatcaatatatgcagagtatgcttatgattttgcaaaaatagccaaaaaacatggagtaaaaataacatgggtatctaatggttatttaacagacgaagcaatagagtacgcagcaaaatttttagatgcgataacaatagacattaaaggaaatgccaataacgattttgccagaaaatacatattaatcccagattatgaaccagtattgcatgctatagaggaattctataaaaaaggaatacacttagaaataaccgatttgatagtgccaaaagttggtgataatattgacgatgctagaaagctagcaaaatttatttacgatgttatgggagaagattccaacatacatttcctccgattccacccgatgtataaaatgaaggacttaccccccacagatgttaaaattttagagaaacatgcagaagtggcaaaagaggaagggataaaatatgtttatattggaaatgtcccagggcataagctagagaatacctattgccccaaatgcggtaaaccagtaataaaaaggttcggtttcaaagtatatgaaatacatttaactaaagataatagatgtgaatattgtggttacaaattgccaataaaggggaatgctagaaaaagcattatagattaccctataccattactatga

SEQ ID NO: 963 - protein, 349 aa, Nanoarcheum equitans
MRKADLAKGNTCLACARKCKLFEGAVGFCGVRKNINNTIYVLNYGRFVAFNIDPIEKKPLYHFYPGNVAFSLGTTGCSWACKYCINYDISQRRQIVGTYISPEELLDIVLNYSQKLNAEPIVTFTYNEPSIYAEYAYDFAKIAKKHGVKITWVSNGYLTDEAIEYAAKFLDAITIDIKGNANNDFARKYILIPDYEPVLHAIEEFYKKGIHLEITDLIVPKVGDNIDDARKLAKFIYDVMGEDSNIHFLRFHPMYKMKDLPPTDVKILEKHAEVAKEEGIKYVYIGNVPGHKLENTYCPKCGKPVIKRFGFKVYEIHLTKDNRCEYCGYKLPIKGNARKSIIDYPIPLL

SEQ ID NO: 964 - DNA, 1485 bp, Nanoarcheum equitans
atgcgcatcgactctaacttaaaaggcgatctaaaaatagtattcgataatgctcaagctagggctatagaacattattggagatcatttatcatattatcgggaaaaaaccctgaaaaaccattgccaggaataatagaaaatgctattagatatcaaaaagagcttagagtaaaaccccaagtattatatgtaagcgaagacagagaacaaaacattagaagatatcaatattttatagaaaatactaatttaaagggagcaaaactcgatagaatatattttaaagaaactcaaaaggtattaggtaaaacttatgatattcttattatggatttaaccaactctctaaccccagatgatttgggaaggctattcggtttagttagaggcactggattaataatcgctttagctccctctattgataaatgggataaaataataacaacattccatgaacatttggttacacctccctatactataaaggatgtaaagcattatttcgaagaaaggtgggttaaaaaattgtttgaacacgaagtttatatatatgatacagacaaagaaaaagcgataaaatatatagagaacgaaaaagatgttgctcctccaaaagcagaattccatagagtttatggagaggtttttcccaaaaagctatatgggatgtgcgtaacaaaagaccaagcagaggcattaaaaaaattcgaaaaccttgttaataaagagatagcttatgttttaactgccgatagaggtaggggaaaatccgtagcagttggtttggggatagcgggaattacatatgttttttataaaaaaccgttctatattgggataactgcaccgaatagaggtaacatagaatcgctatgggaatttttgaaaaaagctttggaaaagttagagctaaaatatgaagaaaaaaagaacaaaataaaagctgggaaagtaattatagagtataagcaaccgcaagatttggttaaaagaaaatatgatttagttgctgtcgatgaagctgcaggagtatatgtaacatatttgtataaaataatgaacaaatacgatagattggtattctctacaaccatacatggttatgaaggggcgggtagaacatttaatgttagatttttgaaagcgctaaaggaaaaccccaatctaatggttatagagcataaaatgaaagagcctataagatatgccatagacgaccctgtagaaaggtttatgtatgatgtattgttattagatgctgagccggccaaaatagaaaaccccacaaatccaaaattagttaaaccggacaaaagagatttcattctaaaccaagaagagaagttaaggcaatttgttggaatatatattatggcccattataagaataggcccaacgatatagcaatgttagcggatgcaccccaccatgatttatattatttagaggttgaagataataaagacgaagatcaataa

SEQ ID NO: 965 - protein, 494 aa, Nanoarcheum equitans
MRIDSNLKGDLKIVFDNAQARAIEHYWRSFIILSGKNPEKPLPGIIENAIRYQKELRVKPQVLYVSEDREQNIRRYQYFIENTNLKGAKLDRIYFKETQKVLGKTYDILIMDLTNSLTPDDLGRLFGLVRGTGLIIALAPSIDKWDKIITTFHEHLVTPPYTIKDVKHYFEERWVKKLFEHEVYIYDTDKEKAIKYIENEKDVAPPKAEFHRVYGEVFPKKLYGMCVTKDQAEALKKFENLVNKEIAYVLTADRGRGKSVAVGLGIAGITYVFYKKPFYIGITAPNRGNIESLWEFLKKALEKLELKYEEKKNKIKAGKVIIEYKQPQDLVKRKYDLVAVDEAAGVYVTYLYKIMNKYDRLVFSTTIHGYEGAGRTFNVRFLKALKENPNLMVIEHKMKEPIRYAIDDPVERFMYDVLLLDAEPAKIENPTNPKLVKPDKRDFILNQEEKLRQFVGIYIMAHYKNRPNDIAMLADAPHHDLYYLEVEDNKDEDQ

SEQ ID NO: 966 - DNA, 1725 bp, Nanoarcheum equitans
atgaagattaggcaacctataattactatattgggacatgtagaccatggtaaaaccacactgttagacaaaattagaaaaacagcagtggcacaaaaagaagctgggggcattacccaacatattggagcaacagaagtccctatagaggttatagaaaagatagcagagccaataagagatattttaaagttcgaactaaaaataccgggtttgttatttatagacacccctggccacgaagcttttagcaatttaagaaagagaggcggttctattgcagatttagctattgttgttatagacataaacgaagggattatgccccaaactaaagaagcaattgaaatatgtaaacaatttagagttccatttattattgctgctaataaaatagacaaaatccctggatgggaatcaagagaaggatctttcataaaaaattaccaaaggcaaagtgatagggcgaaacaagaattagaaaatagagtatacaatttagtttcccaattatatgaattgggtttcgaatcggatatattttttagaatagaagattttaggaaaacagttgcaattgttccagtatcagcaaaaactggcgaaggaattccagaattattattactaacagcaggtttagctcaaagatttctaacaaagaaattagagattgatgaaaactctcctggaaaaggggttatattagagaagaaaaaagataaaggtatatattatttggatgtcattttatatgatggtgttataaggaaaggagatactatcgctttttatggtattgaagggccaataataacaaaagtaaggggtttatttaaagcgaagcctttgacagagattagggaaaaatccaattttattccagtaaacgaagcacatgccgcagcgggtattagaatattaactccagaaaacgataaagctttggcaggttccccattatatgttattagaaataaccaatctaaaatattggaacaaattaaagaagagataagctctatagtatttgaagaaaaagagggtttagtagtgaaagccgatacattaggaactttggaagcaatagttaatatactaaaatctaaaggaataaaggtttcaaaagcaggtattggagagataacaaaagaagatataattaaagcacaatcgcaaaaagatgaaaagtatagagttatattggcttttaatgttagccctattgaaagcccagttccaataatttatgacaatgttatctataggttattagagaaatacgaagagtttttgaagcaattagaagaacaaaagaagctttctatattagatagattaactcctgtagcaaaaatagagataattcctggtttagtatttagaaggaaagacccagcaatagttggagttaaagttattggcaaaataaagcccaatgttttattaatgaacgaagaaggaaaaataatcggaagagtaaaatcaatacaaaaagaaggagtatccttaaaagaagcagaaaatgatgaagtagctatagccatagaaggagttactgttggtaggcaaataaaagaaggagatacattatatacttacattagagaagaagaatttaaagaatataaaaagcataaagatttgttaaatgaaactcaaaaaaccattttaaaagaaatagcacaaataatgagaaaacaaaaccccacttgggggctctaa

SEQ ID NO: 967 - protein, 574 aa, Nanoarcheum equitans
MKIRQPIITILGHVDHGKTTLLDKIRKTAVAQKEAGGITQHIGATEVPIEVIEKIAEPIRDILKFELKIPGLLFIDTPGHEAFSNLRKRGGSIADLAIVVIDINEGIMPQTKEAIEICKQFRVPFIIAANKIDKIPGWESREGSFIKNYQRQSDRAKQELENRVYNLVSQLYELGFESDIFFRIEDFRKTVAIVPVSAKTGEGIPELLLLTAGLAQRFLTKKLEIDENSPGKGVILEKKKDKGIYYLDVILYDGVIRKGDTIAFYGIEGPIITKVRGLFKAKPLTEIREKSNFIPVNEAHAAAGIRILTPENDKALAGSPLYVIRNNQSKILEQIKEEISSIVFEEKEGLVVKADTLGTLEAIVNILKSKGIKVSKAGIGEITKEDIIKAQSQKDEKYRVILAFNVSPIESPVPIIYDNVIYRLLEKYEEFLKQLEEQKKLSILDRLTPVAKIEIIPGLVFRRKDPAIVGVKVIGKIKPNVLLMNEEGKIIGRVKSIQKEGVSLKEAENDEVAIAIEGVTVGRQIKEGDTLYTYIREEEFKEYKKHKDLLNETQKTILKEIAQIMRKQNPTWGL

SEQ ID NO: 968 - DNA, 504 bp, Nanoarcheum equitans
gtgacacacattagagttccacctagagtaaaagagaaactacaattgctaacacaagaattaggtttcaaatcaatgggagaaacattagaatacattttagaattcgacgattttataaaaaaattggaaatccttagaactaaagaaaaaatagaagaaattaattataaaatagagatattgcaaaggaaaaaagctattttagagaaaaagttagaatccatagagagtttaaaaagcaacatagattgtttgaaaagattaaaaaattgcgaaaaccagactattgataagcaatcaatagccaataagcttatagcttattttgtgtatttgtttctaaaaaacaatgatcctaatttgttagaaaaaataattttaaatgaagcagatttaagtgaaataaagaaaaaatacccttggttgccaataaataagatagccttgcaaattctaaaggaaaatgatttcgaaaataaaacaattatagacctaatttag

SEQ ID NO: 969 - protein, 167 aa, Nanoarcheum equitans
MTHIRVPPRVKEKLQLLTQELGFKSMGETLEYILEFDDFIKKLEILRTKEKIEEINYKIEILQRKKAILEKKLESIESLKSNIDCLKRLKNCENQTIDKQSIANKLIAYFVYLFLKNNDPNLLEKIILNEADLSEIKKKYPWLPINKIALQILKENDFENKTIIDLI

SEQ ID NO: 970 - DNA, 402 bp, Nanoarcheum equitans
atgcgctatgaattgagattatataaagagttgtcttttaaagaaatagaaaaaataggcgaatttctttttggggttaatagagaatatgatttgctaaaaaaatacaacataaaacctttgtatatcgataccccattggaatataaagagtatcccacaatcacagctttgtttttattaaaggatttggccaaagacaaagtttatttagacgaagtaggagctagagattttatctatggaaaggatgtacatcaaaagaattttctcaaaatagaaggctacaaatacgctaatttattagttttaaatggccagggattacctttaggtattggaaaaattaaaggcaaaatattgaaaaacctatttaatataagtttttataggagatactaa

SEQ ID NO: 971 - protein, 133 aa, Nanoarcheum equitans
MRYELRLYKELSFKEIEKIGEFLFGVNREYDLLKKYNIKPLYIDTPLEYKEYPTITALFLLKDLAKDKVYLDEVGARDFIYGKDVHQKNFLKIEGYKYANLLVLNGQGLPLGIGKIKGKILKNLFNISFYRRY

SEQ ID NO: 972 - DNA, 1071 bp, Nanoarcheum equitans
atgagaagtataactccgattattgcaatagtaatacttttattagtcacgataagcgccgttactcctttatatttatgggtacagaaaggtgtgcaaaaatattctcaaaaagctacaaaaactgcagatacaacatttaagtctataactaatctagaaatagctgatataaagatatataaaaaatatgatggagcattggctttatggtatttagatgagggttttggtaatattgttgatgattatagtaacaataattacaagcttaaatttgagggatctccgagatgggttaaaggagtacttagcaacgctttagaatttaatggaaatagctcattaaaaggaaattaccaattgcttgttggtaaaacaaaatggagtataactttgataacaaaaccatatagtcttgccaattacacatatgcagagggcacaacagatggtgacaaaatcgttttagaaattgctaacaataaatttagaattgctatatctaataactctgtaggttggcaaagattgtcctctagtttacctcttagtaaaaacgaatggtattttgttgctgtaacttatgatggagataatctaaaaatatgtgttaataatgtttgtaatagtactagtggtataaaatcagcaaccactggagggggtacagtaaaaatagcaaatggcgtttatgctaactacccctataaaggagttatcgacgaaatatatctatataatgaaccattggacaataaaactattgaaaatctatactataggctaaccgttagagtagtaaaccctaacgatagaccaataaaaatagagggttattaccaaatagaagatccagaaactggtaatataatatgtgagatcccattaaagtataaagaaacttttataacagattcgggatcagatttaataaaaccatcaaaagaagaaactataagaatggtattgttttacaaagataagcattgctctcttaataaatggaaaacatataatttttgtttaacaaacggtatcaatagggtttgtaaattgttccatccataa

SEQ ID NO: 973 - protein, 356 aa, Nanoarcheum equitans
  signal (1)..(20)
MRSITPIIAIVILLLVTISAVTPLYLWVQKGVQKYSQKATKTADTTFKSITNLEIADIKIYKKYDGALALWYLDEGFGNIVDDYSNNNYKLKFEGSPRWVKGVLSNALEFNGNSSLKGNYQLLVGKTKWSITLITKPYSLANYTYAEGTTDGDKIVLEIANNKFRIAISNNSVGWQRLSSSLPLSKNEWYFVAVTYDGDNLKICVNNVCNSTSGIKSATTGGGTVKIANGVYANYPYKGVIDEIYLYNEPLDNKTIENLYYRLTVRVVNPNDRPIKIEGYYQIEDPETGNIICEIPLKYKETFITDSGSDLIKPSKEETIRMVLFYKDKHCSLNKWKTYNFCLTNGINRVCKLFHP

SEQ ID NO: 974 - DNA, 519 bp, Nanoarcheum equitans
atgcgtgtatttttggctatagatttgcctgaagaactaaaaaaccaaatatactcttattacaaaaaagtttctaaagcggtttatggcaagtttgtcgaaaaggaaaacttacacattactttaaaatttattggagaagtattagacataaatccattgatagaaaggttaaattatgtgaaattcaaaccctttgaagtaaaggtaaaaggattgtctgcttttccttcaatagagaacccaagagttgtatgggttggggcacattctgtttatttaaacgatttggcaaaccaaattaatagggttttaaaaagctatgaaaattttgtcggccatataactatagtaagagttaaaagagtattagacaaaaaataccttttagagttggctaaaaaatttgatttggaatataaatttgtggtcgatagattttatttgtataaatcaaccctaaccccaaatggtccaatatatgaaaaattatacgaattcaaatcgattcaagattaa

SEQ ID NO: 975 - protein, 172 aa, Nanoarcheum equitans
MRVFLAIDLPEELKNQIYSYYKKVSKAVYGKFVEKENLHITLKFIGEVLDINPLIERLNYVKFKPFEVKVKGLSAFPSIENPRVVWVGAHSVYLNDLANQINRVLKSYENFVGHITIVRVKRVLDKKYLLELAKKFDLEYKFVVDRFYLYKSTLTPNGPIYEKLYEFKSIQD

SEQ ID NO: 976 - DNA, 486 bp, Nanoarcheum equitans
atggttggaaaaagagaacttatagaaattagagaaaaaattgctgaaatagaaagaaaaatcgatttgttagaggacaaagcattaaatggtatattaaatatagacgaaattttagaaaccaaaaaagagatcaatgttctattaagaaaaataaataaactaatagagtttggagaaaacacaaaagagttggaaaaactaaaaagctatcttttaacacttaagtcagatttattttatatattagatataaacgatagtgtaatcaataaaagaataaatgaaaatctaaataagttggcatttatctctatagcttttgcccccgccacttttgttacaagcctctatgggatgaacttcgtcaatgctatccctccatgggaaacaaagcatggctttattttagccataataattgctattatttctacaatattctctttccttatagtgaagaaaattaatcttgaatcgatttga

SEQ ID NO: 977 - protein, 161 aa, Nanoarcheum equitans
MVGKRELIEIREKIAEIERKIDLLEDKALNGILNIDEILETKKEINVLLRKINKLIEFGENTKELEKLKSYLLTLKSDLFYILDINDSVINKRINENLNKLAFISIAFAPATFVTSLYGMNFVNAIPPWETKHGFILAIIIAIISTIFSFLIVKKINLESI

SEQ ID NO: 978 - DNA, 1068 bp, Nanoarcheum equitans
atgataaccctagttgggtatgaattaatcgatggcattactggtaaaaacgatcccatattattgaaaatctatgtttattcgaatgaaaacaaatacatagttattgacaccgatagaaccaaatggtttgggaaccttccaattataatagagcccaaaggtttaagaaacataactataaaagctgttccaaggaaatgctatagcttttttccattgtatataaacgaccaaaaatatctaatcccagtatattgtaaagaagtaaaaaaagaagaagagaaaaaagagtattacgatgtaaatgtttctatcaatgatactataaaggtttgtgtaaatggccaatttaataacctaaaatatttagttaggattgatgatagaaagtattctggtttaattccttttccaacttgtttggagtttcctaaaaatgaaagccctgggaagcataatgtttatgtatcaatacaaaatagtaaaacaatagagaaagaattaacatactatgttaaacccatattcttttataccataaactataaaccaaaaatcgggttattaaaagaggaaatagaaataatactaaaaacctatggcaataccaaagggaaagttgaattttgtgcaaaagatttgtgcataaaaggagaattccctccaaatatagagagagtttatagagtaaaatacgactatagcttgtattttgctataggcttaatagcaggtttgtctttgttgggattgtattattatttaaacaaaaaaagaataaaagttaacaaaaattatactttggaaggcaatatagtaaaagtaaccttagagataacaaacaaatccttgtttagggttaaaggctatattttagatcctattcctaaggatgcagaagtagagatattaactaacaacgccaaaataaaagacatcgccggaaacaaatttgtttatgcgatatatgatttaatgcctggagaaacattagttatagcttataaattaaaaatgcctttcgaaataacagaaatcgatttgccaaaacctattgttctttga

SEQ ID NO: 979 - protein, 355 aa, Nanoarcheum equitans
MITLVGYELIDGITGKNDPILLKIYVYSNENKYIVIDTDRTKWFGNLPIIIEPKGLRNITIKAVPRKCYSFFPLYINDQKYLIPVYCKEVKKEEEKKEYYDVNVSINDTIKVCVNGQFNNLKYLVRIDDRKYSGLIPFPTCLEFPKNESPGKHNVYVSIQNSKTIEKELTYYVKPIFFYTINYKPKIGLLKEEIEIILKTYGNTKGKVEFCAKDLCIKGEFPPNIERVYRVKYDYSLYFAIGLIAGLSLLGLYYYLNKKRIKVNKNYTLEGNIVKVTLEITNKSLFRVKGYILDPIPKDAEVEILTNNAKIKDIAGNKFVYAIYDLMPGETLVIAYKLKMPFEITEIDLPKPIVL

SEQ ID NO: 980 - DNA, 2613 bp, Nanoarcheum equitans
gtggaaataaaaaagttaggtttaatagatcttagacctttggatccagaagttataaggaaactgtctgttgttgaagttaaaataccagagccatacgatagggatggtctcccaatagaaaatggccccatggatcctaggatgggtgtcattgaccctggtttaagatgtaaaacctgtgggggcaaatatggtgaatgcttaggacattttggtaggatagaattggctcgccctgtataccatgtaaaattcctaaacgaaataaaaagattattacaatacacatgcccaaaatgtggaagagcaataatacctcaaaagcttaaagaacaattcctaaaaaagataaacgaatatattaatgaaggcaaatatgatgagttaagcaatttcatccaatccacagtaattccgaaaataaatgaatacaggaaaaagcataagaaatgcccatactgtaatgcagaactaaaagaaataaaattcgaaaaaccatggtatttctatataaaagaaaagataggcgataaagaagaatgggttaaactaactcctttagatgtaaggcaatggttagaaaaaataccagacgaagatgctaaattgtttggcataataaatggaaggccagaatggctagttttaactgttatattagtgcccccagttacggctaggccatctataatattagaaaccggagaaagaagtgaagacgatttaactcataaaatagcagatatagttaggattaataataggattgaagaattattatcctatggagcaccagagccaattttagaagaaaactgggaaatgcttcaataccatgttgctacctatttcgataacgaattacctaatgtaccaaaagctaggcatagaagtgggagaccattaaaaggtttgttacaaagaataaaaggaaaggaaggtaggctaaggagaaacttagctggaaagagagttaacttttctgcgaggggagtaattagtgtagacccaagaatagatatagacgaagttggtgtaccagaacaagtagcgaaagagttaacattccctgaaatagtaacagaatggaatttggattggctaaaacaaaaagtattgaatggacccgaatctttagatggggcaaactatgttatagaccccaatggtaggagattcaaaataatggaagaaaataaagaagaattagccgaaagattagagccaggttgggttgttgagagacatattattaatggcgattacgctttgttcaatagacaaccatctttgcataaaatgtctatgatggggcatagatctgttatattgccaggcaaaacatttaggctaaaccctgcaactactaccccatacaatgctgattttgatggagatgaaatgaattaccatttagtacaaaactacgaaggtaaaacagaaatagaatttttagcaaatgttagagaacatatagttactccaaggtatgggttagccattattggagccacagaagacataattacagggctatatttgttatccttaaaagataaaattcctttcaaagatgcaatacaattaattgaatacaattgcaaatattttggaaaagacaaaatattaaaactagtagaaaaagccaaaaaggagggaagagattatttgactggcaaagaagtattttctgctttgttgccagatgatttagatttcgaaataaaaacaaaaaatggagaatttgttataaaaaatggcatactattaaaaggagtaatagacaaagaaatagttggtgtagaaaagggaaaactaattagagaattatttgaaagatatggccctgaatttacattcaaatggcttagcgatgtaaccaggttgtctgttaattatttgactagagagcaattaactattagtttttccgatatcgatattccaaaagaagttaaagaacaaataagaaaaattattgaaaaagccaaaaaagaagtagataatttgattgagagatacaaaaaaggagaaataaaaccattgcctggtagaactatagaggaaacattagaaatagaaatattgaaagttctaaacaaagctagagacgaagttggagaggtaatagagaaacatgtagacccaactaaaggtacaatgattttagctaaatctggagcaagaggtaagctattaaacttaatacaagttgtaggattggttggccaacaatcaatttctggaagaagaatggaagaaggttataaagatagggtattgccccactttaagaaaggggacaaaagcgcaaaagctaggggttttgtagaacatggttttgcagatgggttagacccaatagagttcttcttccatgctgcatctggtaaagatgcactaatggatacaactttaagaacaccaaagagcggttatctatatagaaggttggtctcagtattaagagatctatatgtagaaaatgatagaaccgttagagacacttttggtaacatataccaatttatttggggagaagatggaatagctgtacaaaaatctgaaggaggaaaattaaatgtggaaaaaattttcaaagaacaatag

SEQ ID NO: 981 - protein, 870 aa, Nanoarcheum equitans
MEIKKLGLIDLRPLDPEVIRKLSVVEVKIPEPYDRDGLPIENGPMDPRMGVIDPGLRCKTCGGKYGECLGHFGRIELARPVYHVKFLNEIKRLLQYTCPKCGRAIIPQKLKEQFLKKINEYINEGKYDELSNFIQSTVIPKINEYRKKHKKCPYCNAELKEIKFEKPWYFYIKEKIGDKEEWVKLTPLDVRQWLEKIPDEDAKLFGIINGRPEWLVLTVILVPPVTARPSIILETGERSEDDLTHKIADIVRINNRIEELLSYGAPEPILEENWEMLQYHVATYFDNELPNVPKARHRSGRPLKGLLQRIKGKEGRLRRNLAGKRVNFSARGVISVDPRIDIDEVGVPEQVAKELTFPEIVTEWNLDWLKQKVLNGPESLDGANYVIDPNGRRFKIMEENKEELAERLEPGWVVERHIINGDYALFNRQPSLHKMSMMGHRSVILPGKTFRLNPATTTPYNADFDGDEMNYHLVQNYEGKTEIEFLANVREHIVTPRYGLAIIGATEDIITGLYLLSLKDKIPFKDAIQLIEYNCKYFGKDKILKLVEKAKKEGRDYLTGKEVFSALLPDDLDFEIKTKNGEFVIKNGILLKGVIDKEIVGVEKGKLIRELFERYGPEFTFKWLSDVTRLSVNYLTREQLTISFSDIDIPKEVKEQIRKIIEKAKKEVDNLIERYKKGEIKPLPGRTIEETLEIEILKVLNKARDEVGEVIEKHVDPTKGTMILAKSGARGKLLNLIQVVGLVGQQSISGRRMEEGYKDRVLPHFKKGDKSAKARGFVEHGFADGLDPIEFFFHAASGKDALMDTTLRTPKSGYLYRRLVSVLRDLYVENDRTVRDTFGNIYQFIWGEDGIAVQKSEGGKLNVEKIFKEQ

SEQ ID NO: 982 - DNA, 768 bp, Nanoarcheum equitans
atgagaattaggttgcctttgtataaacctattaaagaagtggcagaagattattataacaaagccaaaaaaattaaagaaaaaattgaaagagccaaagctttgttaaatgaagaactaaaaaaagaagaaagaaaaaagaaagaaataaaaaaggaatggtttatgaagtatagatttacttttactgaaagcggttttttagttattggaggaaaggatgctaaccaaaatgaaagaataatgaaagtttatagaaaggatggcgatttggtattccatgccgatatacatggggcaccattcgctttaatgttattgaataaccccaatgcagatagcgttgaagaagttatagaaaaatataaaataacggaaaccgatttaatgcaagcagcaggtttaagtgctgtatattctaaagcatggcaagaaggcttagcttcgatagatgttttctatgttttgggcaagcaaatctctaaaaaagctccttctggagaatatctaaagcatggttcctttatggtttatggcaaaaaacattatattagggtgcctttgagattatacatagtagaaaaagaaaaggtctatgctgtgccttccatttataatggggacaaatacatagaattaattcctggcgatattaagaaagaaaagatagcgaaaaaaattgcagaattattaaatgttagcgaagattacataaaatcgcttttgccttcaggttatttcagaattaccaagattaaaaatatttga

SEQ ID NO: 983 - protein, 255 aa, Nanoarcheum equitans
MRIRLPLYKPIKEVAEDYYNKAKKIKEKIERAKALLNEELKKEERKKKEIKKEWFMKYRFTFTESGFLVIGGKDANQNERIMKVYRKDGDLVFHADIHGAPFALMLLNNPNADSVEEVIEKYKITETDLMQAAGLSAVYSKAWQEGLASIDVFYVLGKQISKKAPSGEYLKHGSFMVYGKKHYIRVPLRLYIVEKEKVYAVPSIYNGDKYIELIPGDIKKEKIAKKIAELLNVSEDYIKSLLPSGYFRITKIKNI

SEQ ID NO: 984 - DNA, 1452 bp, Nanoarcheum equitans
atgattgtgctaagacccaaagaatatgaagtatacaaaaaattgattaatgggtattctaatgaattggcgaaccttttagggatggatgaagaagaattgctaaaaatagcatataatttgcaacaaaaaggcctagttaaaattaaagaagaaaaagatacatactatgttttaacggaaaaaggtaaaaaaagttataagaatttgcctgaaagaaaattatattctttattagaattacatggggaattgcctttagatcaaataccattaaccaaagaagaaaaagccattgcaattggggcattaaagaatttagatctaatagaaataaaagatgggaaaataaaactaaagagagagataaaggaattcccatgggaacccttattattagcaataaacgaagggttaaagaaagacctttcgaatttaaaggaaatagaagcaaaattaggtaaaaagatcgataccaaatatttagattatttaaagaaaagaggtttagtaaaggaagaaaccaaaacaagattttatatagaagtaattccaaaagatgttgtagaaggaatagataaaatcgatacagaggtattacagaaaaaattatataaagaaaagccaattgctccctataatataaaggaatttccaaaatactatggagggaagccccattattatagagaatacttaaattgggttaggaaaaaaatggtaaacctcggatggaaagagctaaatgctatggaatatgaattaatcccaatgttctggtgtttcgaggctttatttactccttatgaccatccatcgagagaattggcagaatcctttataatagaaggaaaacccgaattggatgtaccaaaagacatagaagaaaaagtaaaagaaaaacatttacaatattttggcaactatttagaaaaggaagcacatctaacaatattaagaagccaaaatactgcaattacagcttggaatttatataatttaagagatattctaaataacgagaaaggcaaatacttttacatcggctctgtttggagaccagatacaatagacaaaacccaccatatagagtttcaacaattagagggaataattattggctcaaacatggcccaattaaaaacagaaatagaaaaaatcctaaaagcattagggtttgagaaaataaaactattccctgcgtttttcccatttacggagccatccgtagaagtatatgcataccatagtaaattgggctgggtagaagttgctggagcagggatgttaagaaaacaaatattagacagttttggtataaaacataaaataggagctttcggtattgggataaatagattagcgatgatcgctttaggaatagatgatataagagatttgtatggccaagacatagataaaattagagaatggcctatcaaatatttttaa

SEQ ID NO: 985 - protein, 483 aa, Nanoarcheum equitans
MIVLRPKEYEVYKKLINGYSNELANLLGMDEEELLKIAYNLQQKGLVKIKEEKDTYYVLTEKGKKSYKNLPERKLYSLLELHGELPLDQIPLTKEEKAIAIGALKNLDLIEIKDGKIKLKREIKEFPWEPLLLAINEGLKKDLSNLKEIEAKLGKKIDTKYLDYLKKRGLVKEETKTRFYIEVIPKDVVEGIDKIDTEVLQKKLYKEKPIAPYNIKEFPKYYGGKPHYYREYLNWVRKKMVNLGWKELNAMEYELIPMFWCFEALFTPYDHPSRELAESFIIEGKPELDVPKDIEEKVKEKHLQYFGNYLEKEAHLTILRSQNTAITAWNLYNLRDILNNEKGKYFYIGSVWRPDTIDKTHHIEFQQLEGIIIGSNMAQLKTEIEKILKALGFEKIKLFPAFFPFTEPSVEVYAYHSKLGWVEVAGAGMLRKQILDSFGIKHKIGAFGIGINRLAMIALGIDDIRDLYGQDIDKIREWPIKYF

SEQ ID NO: 986 - DNA, 276 bp, Nanoarcheum equitans
atgaagaaaaaacaaccaataaaacatagactagtaccagaataccaaaagctaactaaagaagaagtagaaaaactattaaaagagctaaatattgatagtatagactatttgccaaaaatatatgttgacgatcctgctatacaacacttaaacccgaagcctggggatgttttaagaataataagaaaaagccccactgctggaaaaactatatattatagggttgtaatagaaagaccaaaaattgttgaaaaagaagaggaagaagaataa

SEQ ID NO: 987 - protein, 91 aa, Nanoarcheum equitans
MKKKQPIKHRLVPEYQKLTKEEVEKLLKELNIDSIDYLPKIYVDDPAIQHLNPKPGDVLRIIRKSPTAGKTIYYRVVIERPKIVEKEEEEE

SEQ ID NO: 988 - DNA, 606 bp, Nanoarcheum equitans
atggatactctagttccaataaatgtttatgttaaagccggtatacatattggtacaaggcacctaactaaagatatgaaaccttatgtatctaagataagagaagacggtttagctattttcgatataagaaaaatagatgaaagattaagattagcatcaaagatgttatcctattatgaaccaaatgaaattttagttgtaggaagaagagaaacagcaataaccccaattaagaagttttctgaaataacaaaggttaaagctttccctgggagatatcctccaggtacattaactaacccccaactaaaatactacatggaaccagaagtaatattaattaccgatccaataatggacaaaaatgctttacacgatgcatacgaaagtgggataacaattttggcattatgtgatacaaaccatactaaaaattatattgatttctgtataccagcaaacaatagaggttctaaaagcttagcattaatatattggatattagcgagagaatatttaaggaatagaggagtaattggtaaagatgaacaattaaaagtaccggtcgaagagtttgaaactaaaataactgtagaagaatga

SEQ ID NO: 989 - protein, 201 aa, Nanoarcheum equitans
MDTLVPINVYVKAGIHIGTRHLTKDMKPYVSKIREDGLAIFDIRKIDERLRLASKMLSYYEPNEILVVGRRETAITPIKKFSEITKVKAFPGRYPPGTLTNPQLKYYMEPEVILITDPIMDKNALHDAYESGITILALCDTNHTKNYIDFCIPANNRGSKSLALIYWILAREYLRNRGVIGKDEQLKVPVEEFETKITVEE

SEQ ID NO: 990 - DNA, 1704 bp, Nanoarcheum equitans
atggagtttgagaaattggctaacctttttagtaagctcgaaactatatcggataaaaccaggaaagtgcaatacatcgctcgatttcttaaagaattaaaagaccaatataaagaaacattgttgttattgcaaggaaccgttttttacccatgggagcaaaaaaacctcggtattgccgaaaagggtgtaataagggctatttctatagcttatgggatagaaaaacaaaaagttgaagaattattcataaaatatggggatttgggtattgtggcagaaaaagcttgtgagatgagaaaacaaaaacccttattattaaaaccgctaactgttaaagatgtttaccaaactttaagaaaaatagccgatatagaaggagaaggctcacaggacaaaaaaataataacttttgctaagctattagttaatgccaaacctaaagaagcaaaatacattgttagattagctttagaggaattaagaattggagtaggtgaaggtattattagagatgcgattgctatagctttttctgtaacccccgaggctgtggaatatgcttattctatattattagattttggagaggtagtaagaattgcgaaagagcagggcgagcaaggtctatggcaagtaaaattacaagtagggagaccctttagagttatgctcgctataagagcaaggaatgtgcaagaagcttttgacattgtaggaaggcctgcaatgatagaagcaaaatacgatggttttaggttacaaatccataaaaaaggagaccaagtatggctatggactagaaggttagaagatgtaacaagacaattcccagatgtagttaatatagtaagaaacagagtaaaagctaacgaaataatatttgaggcagaggctgttgggtatgataaaaagactaacaaattcttgccattccaaaagatttctcaaagagtgaaaagaaaatatgacatagaaaaaatggctaaagaaataccagtagagctacacgcatttgatatagtttatttagaaggtgaacaattaatgaaaaagccatttaaagagagaagggctctattggaaaaagtaattgatgaaaaagagcatgaaatacaattgtctataggcattatagaaaaagatgataaaaaagcttaccaattttaccaagattgtttaaataaagggttagaaggagtaatgttcaaaaaccttaatgcaccataccaacctggaagaagggtaggatatatggttaagctaaagcctactttagaaacattggatttagttatagttgctgctgaatggggcgaaggtaaaagaagcggttggcttacttcatttactgtagcagcattagataaggatactggtaattatttagaagtgggtgaagtcggtacaggaataaaagagaaaaaagagagagccgaggatataacttttgaggaattaaccgaattgttaaaaccttatatatataaacaagaaggtaaaaaagtttacgtaaaaccaaaaatagttgtagaagttgcatatgaggaaatacaagaaagcccccgctataaaagcgggtttgctttaaggttccctcgtattgttagaattagattcgatagaagcccaaaagagatagacacaatcgataggataaaacaaatatacgaaatgcagagaggtggtatacataaacagtaa

SEQ ID NO: 991 - protein, 567 aa, Nanoarcheum equitans
MEFEKLANLFSKLETISDKTRKVQYIARFLKELKDQYKETLLLLQGTVFYPWEQKNLGIAEKGVIRAISIAYGIEKQKVEELFIKYGDLGIVAEKACEMRKQKPLLLKPLTVKDVYQTLRKIADIEGEGSQDKKIITFAKLLVNAKPKEAKYIVRLALEELRIGVGEGIIRDAIAIAFSVTPEAVEYAYSILLDFGEVVRIAKEQGEQGLWQVKLQVGRPFRVMLAIRARNVQEAFDIVGRPAMIEAKYDGFRLQIHKKGDQVWLWTRRLEDVTRQFPDVVNIVRNRVKANEIIFEAEAVGYDKKTNKFLPFQKISQRVKRKYDIEKMAKEIPVELHAFDIVYLEGEQLMKKPFKERRALLEKVIDEKEHEIQLSIGIIEKDDKKAYQFYQDCLNKGLEGVMFKNLNAPYQPGRRVGYMVKLKPTLETLDLVIVAAEWGEGKRSGWLTSFTVAALDKDTGNYLEVGEVGTGIKEKKERAEDITFEELTELLKPYIYKQEGKKVYVKPKIVVEVAYEEIQESPRYKSGFALRFPRIVRIRFDRSPKEIDTIDRIKQIYEMQRGGIHKQ

SEQ ID NO: 992 - DNA, 441 bp, Nanoarcheum equitans
atggcttataatacatatatttttcttttattagatctaattgtagtaatattcccttctttattgttaatcccatactatatacaagcatttttgttagcaaaagaggattggtacgatagatatagaaaaatctatttagctactaaccatttattatataatgggctaacattgctatttttgattctttccatgggttatcctttgctctatttgttagtaccaatatttttagctttcacaatagaatcgctaaaagatttaattaatagggactatgaagcaacaatagtattttatttattaagggtttctttcattatagtgcttttattatttagcatgtattatataatattgtctccaatagctttggtattttcttatttaagttggaaaattttagagaagagccctaatagacagggcaataggtaa

SEQ ID NO: 993 - protein, 146 aa, Nanoarcheum equitans
MAYNTYIFLLLDLIVVIFPSLLLIPYYIQAFLLAKEDWYDRYRKIYLATNHLLYNGLTLLFLILSMGYPLLYLLVPIFLAFTIESLKDLINRDYEATIVFYLLRVSFIIVLLLFSMYYIILSPIALVFSYLSWKILEKSPNRQGNR

SEQ ID NO: 994 - DNA, 1119 bp, Nanoarcheum equitans
atgattgatatggatttctttttgcaattgttgaaattcaaaacatttaatccaaacaaagaagaaaaagagaaagctgcgaaatttataaaaaactatttagaaaataaaggatttgatgttgaaataatttacagcgaaaacgataccccaaatattttagcaaaataccccgggaaaggtaagaaagttgcttttgttacacattttgatgttgttccccctggagaaggttggaacacagatccttttgatccaaaagtagaaggaaacaaaataatcgctagaggtgctgcagatgacaaatcagcgatagtagcatctattgcaggaatagaaaatgctaaagaaataaatgtacaacccatattagctatagccgggggagaagaaacccaagaatcaacacaatttttcgaacaaatagatagcgatatagcattagttatcgatacggggccttatgtttctataggtagctctggtttcctaggaataaacatatatgtggaaggaaaacaagtgcattcagcccatgcctataggggggaaaacgcaatatacaatgccgcaaaggttatagagtttatagaacatatttctaaagcttttgagaaaactttattgtctaaataccaatttattgagcattacgatagagtaccagttagggttaaccctacaaagatagaggttaaaccaaatgttattaacataataccgggagaagtaaaaatttatgtaaacgctagaacagtgccagaatacgataatgattatgtttttaacaaggtaagcgatttgttgaaagaattcgcatccaaaaacaacataaaactaagaatagagaaagacaaattagaattacccccatgggttagcgatggagaacatgtagacaaattcatacaactaacaaaagatttgttaggagaaaagaaaatcctagaattaggaggaacagatggataccatttctataaaagaggtataaaagttatacaatttggccccatgagggaagaaaataatatacatggaccaaacgagttcgtttatattgaagatgtagagagggttgcagaagtaataaagagagttgtagaaaatggcttataa

SEQ ID NO: 995 - protein, 372 aa, Nanoarcheum equitans
MIDMDFFLQLLKFKTFNPNKEEKEKAAKFIKNYLENKGFDVEIIYSENDTPNILAKYPGKGKKVAFVTHFDVVPPGEGWNTDPFDPKVEGNKIIARGAADDKSAIVASIAGIENAKEINVQPILAIAGGEETQESTQFFEQIDSDIALVIDTGPYVSIGSSGFLGINIYVEGKQVHSAHAYRGENAIYNAAKVIEFIEHISKAFEKTLLSKYQFIEHYDRVPVRVNPTKIEVKPNVINIIPGEVKIYVNARTVPEYDNDYVFNKVSDLLKEFASKNNIKLRIEKDKLELPPWVSDGEHVDKFIQLTKDLLGEKKILELGGTDGYHFYKRGIKVIQFGPMREENNIHGPNEFVYIEDVERVAEVIKRVVENGL

SEQ ID NO: 996 - DNA, 1050 bp, Nanoarcheum equitans
atgatatttttgggaaaagaagtaataaaggttggtgtaaactttatttatggggagcctatctattatgattatagcaaagttagatatactttagttgtaggaaaaagaggcacgggtaaatcttttactttaggagtattgttagaagggttcgccgaagcaaataataaagagttatctgtaatagtttttgataccttaaacatattccatactttacaataccctaattatagaggtattgatttgttatcggaatggaatttagaaccaaaaaaatttgcaataaatatgatagagcccacgttttctaaagaggatttaagtttttatgatctcttagagtttttttctttggaagaaacagatcccaagagcgatataatttatgaacatttcataaataataaagagcccccttttttgaaacaaagatataaattgttaaaatcattattagggccatctataatagaaaaaataaaaaaccctggtatccatataataagggtaggacatttgcctatatatgctaaaagagcggttttaaatattttagccagaaagattttagaaattagaataaaagagagggaaaaagaaataaaaagggaagcgtctgacgaatatgttagagaagttccattgttttggctatttattgatgaagcacacgaatttttggacaaatctatagacagcccagtaaaggatagtttggttaacctaattagagagggaagaggcccaggagttggtttagtattagcaacacaacaacccaataaattaatagatgatgcgttaactcaaatagattctttaatagcacatagactaactaataaaagcgatattgaatcaatttcctctattttgtacaattacattgatatagattttagaaaatattttgctataaatttgcccaataggcctggggctgccttgtttgttgacgatgaaaaagaattagttaaaccaatacaagtaagaccaaggatgagttaccatggtgggagtacggcccacatttataaaatataa

SEQ ID NO: 997 - protein, 349 aa, Nanoarcheum equitans
MIFLGKEVIKVGVNFIYGEPIYYDYSKVRYTLVVGKRGTGKSFTLGVLLEGFAEANNKELSVIVFDTLNIFHTLQYPNYRGIDLLSEWNLEPKKFAINMIEPTFSKEDLSFYDLLEFFSLEETDPKSDIIYEHFINNKEPPFLKQRYKLLKSLLGPSIIEKIKNPGIHIIRVGHLPIYAKRAVLNILARKILEIRIKEREKEIKREASDEYVREVPLFWLFIDEAHEFLDKSIDSPVKDSLVNLIREGRGPGVGLVLATQQPNKLIDDALTQIDSLIAHRLTNKSDIESISSILYNYIDIDFRKYFAINLPNRPGAALFVDDEKELVKPIQVRPRMSYHGGSTAHIYKI

SEQ ID NO: 998 - DNA, 255 bp, Nanoarcheum equitans
atggacatcgatagaatcgcttatttagctagaataaaattagacgaaaaactaaaagaaaaattaaaaaaagatatagaagaaatactaaaagcttttagtattgttgaaaaccttgatggggaaaaagctttattgcctatagatgttacaggaaaccctagagaagacataccagaaaaaaaggaatttgatttgtggaaaaatgctaaatatagggaagacaactatataatagggcctaaagtaagatga

SEQ ID NO: 999 - protein, 84 aa, Nanoarcheum equitans
MDIDRIAYLARIKLDEKLKEKLKKDIEEILKAFSIVENLDGEKALLPIDVTGNPREDIPEKKEFDLWKNAKYREDNYIIGPKVR

SEQ ID NO: 1000 - DNA, 663 bp, Nanoarcheum equitans
gtgaatattgatgaaataaaagggaaactatctaaaatattaggcataacaaaagaggaattggatgtttggctattattgttcgctttagagaatattgaagaattccttggcttttattatagcaaaaaaatgaatattgattttagaaaagaaatttatagtttaagaaaagagttggagaaacctaaagccatatctattaccgatggaagtgtaaaattggttttcaaacccaattcaagtaaaactagaatatacatagatgcttatatagagaataacagatatagagttggagaagtaattgctaaagatcatgggttggacatttatccttataaagatgcaaaaactatagaagaaaaatttggcatcccaataatagaaaaagccaaaagagcgttgttagagaccgatatagaaaagttaggctcaaaaattagaacagcttatgagataaaaaggccaaaagaaacagaaaaaaacatagataagtatttattagaaaaattcaaagatagagatgtaattaaagcggaggaattagaagaagaactaaaaaagtttggtctaacattagaggaatttagagaaaagctcgattcagaattctttagagagttctatgaaatagaacctggggtctttaaaaggatataa

SEQ ID NO: 1001 - protein, 220 aa, Nanoarcheum equitans
MNIDEIKGKLSKILGITKEELDVWLLLFALENIEEFLGFYYSKKMNIDFRKEIYSLRKELEKPKAISITDGSVKLVFKPNSSKTRIYIDAYIENNRYRVGEVIAKDHGLDIYPYKDAKTIEEKFGIPIIEKAKRALLETDIEKLGSKIRTAYEIKRPKETEKNIDKYLLEKFKDRDVIKAEELEEELKKFGLTLEEFREKLDSEFFREFYEIEPGVFKRI

SEQ ID NO: 1002 - DNA, 651 bp, Nanoarcheum equitans
atggaagaccccctaataaaaatattaaagcaattttctatagaagatgcaaaatatgttgaatacaatttggatagacaattcctagctttgaaggaaaacccaaaacctgttggtttagtcatagctaatgctttaatatcttaccaattaactatgccaggcgagagatattgggagctattcgcgaaaaaagttaatagctttaacgatttatatgatttcgtcaaaaaatataatcctagatttttatcgaataaactaaaaaggttagaaaggtttaagccttacatagatataatagaacaaaatcgagagcactattatgaaaatatggttgctctgaataaatttttggccaaaataatgaaccaaaatatttacgataaaactattgttttttctataaagatgtttgcatatgctatgagagctttgggctataaatttaagcctttcccatttgaaatagctattcctttagactataggctaaaaaagataaatcccgatctaaattattggttttatgtgagcaaacaaaccaacataccaccattacatatagatagtttgatatggcccatatttagaataaaaaatttgcctaaaaagtttgccctattgaaggaatatctatcgaacctttaa

SEQ ID NO: 1003 - protein, 216 aa, Nanoarcheum equitans
MEDPLIKILKQFSIEDAKYVEYNLDRQFLALKENPKPVGLVIANALISYQLTMPGERYWELFAKKVNSFNDLYDFVKKYNPRFLSNKLKRLERFKPYIDIIEQNREHYYENMVALNKFLAKIMNQNIYDKTIVFSIKMFAYAMRALGYKFKPFPFEIAIPLDYRLKKINPDLNYWFYVSKQTNIPPLHIDSLIWPIFRIKNLPKKFALLKEYLSNL

SEQ ID NO: 1004 - DNA, 252 bp, Nanoarcheum equitans
atggctgaaaaagaagttttgttacaacaaattttgatgcaaaaacaagtattagaagcgcaattggaagaaattaacaatgctataaaagagatagaagaatctaacgggaaagtatataaaatactaggtacatactttttagagataccaaaggagaaagcattagaagaattaaatgaaaagaaaaaactattagaaatcagattggatgcattgaaaaaacaagaggaaaagctaaagggagaataa

SEQ ID NO: 1005 - protein, 83 aa, Nanoarcheum equitans
MAEKEVLLQQILMQKQVLEAQLEEINNAIKEIEESNGKVYKILGTYFLEIPKEKALEELNEKKKLLEIRLDALKKQEEKLKGE

SEQ ID NO: 1006 - DNA, 786 bp, Nanoarcheum equitans
atgcaagacataaaagcttttagggatgattttttattaattcctttaataagaggggtttttcgggatcccacaaaatggaggattgttataaaaaatgacactcccaaatgttttaaaggtatccctgtttgtactaacattccatcgtatgtaaagagaagagcacttactgatatagatattttattttatattaatgacatagcatttgaaaagaaaaaccttctgcaaggatataaaaaaatagtgtatgaagaggccgatgttaacacaaaagagtcccaattaaatgaactaataaatactgctgcaataacaataatgaagcaactatttactcaagctctcacaacaatatatggcaaactatatcctaaaaaactatatatcgatgttttgggaggaaaacccaaaaacgaagtttattggggggttattataccaccaaattatctgctcatatcggcaaggtttgctcgaagtaaaatatggcttagcgggttaagctatagtttgccttttaatgcgagttctattattaatgcatttttagaatttagtaggacacgtaaactgggagcaagcttttataatacttatcccacttatacaaaacatattgaaatattaaacatacccccaaacgaggaaagcataaaaaatttagcaatatctttaacatatgcagaacattctggatgggatattgatacatattgggaagtatttaattatttaagagagtctttggaagattttcttagatatggagtggaaaactaa

SEQ ID NO: 1007 - protein, 261 aa, Nanoarcheum equitans
MQDIKAFRDDFLLIPLIRGVFRDPTKWRIVIKNDTPKCFKGIPVCTNIPSYVKRRALTDIDILFYINDIAFEKKNLLQGYKKIVYEEADVNTKESQLNELINTAAITIMKQLFTQALTTIYGKLYPKKLYIDVLGGKPKNEVYWGVIIPPNYLLISARFARSKIWLSGLSYSLPFNASSIINAFLEFSRTRKLGASFYNTYPTYTKHIEILNIPPNEESIKNLAISLTYAEHSGWDIDTYWEVFNYLRESLEDFLRYGVEN

SEQ ID NO: 1008 - DNA, 627 bp, Nanoarcheum equitans
ttgcgagtgaataaaattaaaatatatgggagcgactctatagggttatttggatatatagctaacgatatagcggtattatcagaagtaatatcgaaagaagaggaaaaaataataaaagatacattaggattagaaggaatagtgaaaactacaatagctggaactccaacggttggtagtttcattataggaaaaaaagacttaattattgtgccttcttctatttatgaagaggaattaaaaaaattggaagaactatttagagtagaagtagtagatgttgttaataatgcattaggcaataattattattattggcccaaaaagaatttgctttttgccgcggaggatactaaaaaagaagcaaagcttttagctaaaaagctaaatgcggatttgtatttaattgatactgacatagaagttggcagttctctaatagggaatagcaaaatgctattgcacaatccagacatttatatagatatagaagatgctaaacctgtaacattaaatatgggggacaaatttgttggggctgcagctttgttaaatgacaaaggaatagtcgttggctcaaaaacaacaggtatagagttaattgaattacaggatttattttag

SEQ ID NO: 1009 - protein, 208 aa, Nanoarcheum equitans
MRVNKIKIYGSDSIGLFGYIANDIAVLSEVISKEEEKIIKDTLGLEGIVKTTIAGTPTVGSFIIGKKDLIIVPSSIYEEELKKLEELFRVEVVDVVNNALGNNYYYWPKKNLLFAAEDTKKEAKLLAKKLNADLYLIDTDIEVGSSLIGNSKMLLHNPDIYIDIEDAKPVTLNMGDKFVGAAALLNDKGIVVGSKTTGIELIELQDLF

SEQ ID NO: 1010 - DNA, 390 bp, Nanoarcheum equitans
atgtgcatcttctgtaaaataataaacaaagagatacccgcatatatagtatatgaggacgatttcgttatagcaatattagatatatatccaatggctaagggtcataccttagttattccgaaaaaacatgtaactaggctaaaagagctaagcgaagaagaagctaaaaagctatttgctggtctaaaaaaagttatagaaaaaatagagaaaatctctcctgattataatataataataaaccaaggtccaaaggcgggccaagaaatagaccatttgcatatacatataataccgagaacaggagaagaaaaaatattttataacattaggcataagcttacagaggaagaggcaaaagaggttttagaaaaactaaatggttag

SEQ ID NO: 1011 - protein, 129 aa, Nanoarcheum equitans
MCIFCKIINKEIPAYIVYEDDFVIAILDIYPMAKGHTLVIPKKHVTRLKELSEEEAKKLFAGLKKVIEKIEKISPDYNIIINQGPKAGQEIDHLHIHIIPRTGEEKIFYNIRHKLTEEEAKEVLEKLNG

SEQ ID NO: 1012 - DNA, 189 bp, Nanoarcheum equitans
atggttagagtaatagtagaagggaggggcgaatataatatagaagcgaaaactgtaaaagaagtgttagaaaaacttaatttgaagcctagcgaagtagtagttcacgatggagagaacattttattggaagaggaagagattaaaagcgatactatatatataactttggtcgcttccggaggctaa

SEQ ID NO: 1013 - protein, 62 aa, Nanoarcheum equitans
MVRVIVEGRGEYNIEAKTVKEVLEKLNLKPSEVVVHDGENILLEEEEIKSDTIYITLVASGG

SEQ ID NO: 1014 - DNA, 753 bp, Nanoarcheum equitans
atggattttatgcaattaccacaagtaatgggctatgatagagctagcactctatttagccccgatgggaggttgttacaagtagaatatgcgagaacaacagtaaaacaatcccctaccgctattggtatgctttataaaacaggtgtcctcgttattggagataagaaaattgttgagaaattcgtaataccttcatccatagaaaaggtatacatagttgacgaccatgtaatcgctgctcctgctggtataattggagatggtagagttttaatagagagagcaagagttatagcacaaacttacaaatatttttatggccaccccatcgatattagagggttagtaaaagagatagccgatataaaacaggaatatacccaaattggaggagtaaggccatttggggtctctataatttttgcaggcatagatgatacaggcaaacacatatttgttactgaacctggaggaatgttttgggaatacaaattagctgttataggggaaggagaacagaaggttttggattatttaggaaaagaatataacgaaaacctctcccttaaaaaagcgatagaactaggattaaaggcattgtataatttctacaaagagaataataatgaattaactgctgaaaagttggacatcgcttatgttgatgaaaaaaccaaaaaagcaaaatatgttgatgtaaatgagatagaaaaaatattggaaaaaataaaaagtggaggaaatagttaa

SEQ ID NO: 1015 - protein, 250 aa, Nanoarcheum equitans
MDFMQLPQVMGYDRASTLFSPDGRLLQVEYARTTVKQSPTAIGMLYKTGVLVIGDKKIVEKFVIPSSIEKVYIVDDHVIAAPAGIIGDGRVLIERARVIAQTYKYFYGHPIDIRGLVKEIADIKQEYTQIGGVRPFGVSIIFAGIDDTGKHIFVTEPGGMFWEYKLAVIGEGEQKVLDYLGKEYNENLSLKKAIELGLKALYNFYKENNNELTAEKLDIAYVDEKTKKAKYVDVNEIEKILEKIKSGGNS

SEQ ID NO: 1016 - DNA, 933 bp, Nanoarcheum equitans
gtgaaatgctcctattgtgacaaacccgctatatattacgatggaaaaaaatattattgtaaagagcattttttagaatattttaaaaacttggcattcaaagcgattaaagagtttaacatgttttcgcctggcgatagggttgcagttgctgttagcggggggaaagattctgtaagtttattacattttttaactaaacataaagatgaattggaattaaaagaagttgttggtttagctatagatgaaggaattaaagggtatagagatgtaactttaaattatttgaaagatttcgctaaaaagcacaatcttaaaattaaaattatttccttcaaagaagagataggattaactttagatgaaatgttcgaattaactaaaaaatataatttgggttattggccctgcacttattgtggggtatttaggagatggttgctaaataaatatgctatagaacatttcgatgttttagccacaggtcataatttaaatgatgaagcacaaacagttatattaaatttggcagagcataatataaaggatttagcaaaaggcggacctgttactggtataaagagacataataaattcataaaaagggtaaagcctttctattacattacagaaaaagaaacaacaatctattctattgttaacaaactaaatgtaccttatatagaatgcccctatgctaggggcgcttttagaatttatgtgcgagatttgttgtataaaatggaacatgttagggaattacacgaaaacataataaagaaatacctctcttttagagataagttgcaaaaaaggtataatttcgaattgaaaacatgcaaaatatgtggttttcctactactagagagatatgccaagcatgccaattaagattaacctttcaaaaattgaaagaaaaaaacctttag

SEQ ID NO: 1017 - protein, 310 aa, Nanoarcheum equitans
VKCSYCDKPAIYYDGKKYYCKEHFLEYFKNLAFKAIKEFNMFSPGDRVAVAVSGGKDSVSLLHFLTKHKDELELKEVVGLAIDEGIKGYRDVTLNYLKDFAKKHNLKIKIISFKEEIGLTLDEMFELTKKYNLGYWPCTYCGVFRRWLLNKYAIEHFDVLATGHNLNDEAQTVILNLAEHNIKDLAKGGPVTGIKRHNKFIKRVKPFYYITEKETTIYSIVNKLNVPYIECPYARGAFRIYVRDLLYKMEHVRELHENIIKKYLSFRDKLQKRYNFELKTCKICGFPTTREICQACQLRLTFQKLKEKNL

SEQ ID NO: 1018 - DNA, 1101 bp, Nanoarcheum equitans
atgtacattgctactatagctaataaaggtttagaagatataaatagagaagaaatagagagtctaggcgcaaaatttgataaacaatacgattttattaatatattcaaggtaaaggacttggattctatagttaaaatagctctaaaaactcaaacatctaaaagagtattgtgggtaaaattttttagtgaaccaaacatagatagcattataagagaagcgaaccaaatagattatagcgaaataataaataaaaaatttgctgttagggcgcacaaatatgatatagacatagatataatggatttatataataggttgggcgatgttattagaagaaaaaccaataataaagtagatctaaccaacccagatgtaatatttagaggttacatattaaaagatatcgctatttttggatatgatttaattggggaacaacctttagataagaggtattatagagtatattaccatcccgcaggtttagctccaactattgctaattctttaattagattaaccaaatggaatggccaatctttgttagacccattgtgtgggtctggcacaattccaatagaggcagctttatatttaagggaaatccctccattatatagacaatacgataaaacttttgcctatcaattaaatcccgatataattgatgaaatagaacaatcaataaaatgggataggaaagccaaaatattgtgttttgataaattcgtaaaacatatgagaggagcagagctaaattgcatacatgcaagggtaaaagatatagttaaagtatctaaaataaatttggaagatgtagattttaaattgggagaaaaggccatagattatataattactaatcctccctatggtataaaagctgcagacagagaagaaagcgagaaggttcatgaatatttgttttaccaagcagagtatatattaaaagacaatggagttttagctttgttatccccccataaagaatgggtattaaagtatgctgaaaaatataactttactctaaaacatgagagggaaatttaccacaataaactaaaggtttttttctttcaatttttgaaaggttaa

SEQ ID NO: 1019 - protein, 366 aa, Nanoarcheum equitans
MYIATIANKGLEDINREEIESLGAKFDKQYDFINIFKVKDLDSIVKIALKTQTSKRVLWVKFFSEPNIDSIIREANQIDYSEIINKKFAVRAHKYDIDIDIMDLYNRLGDVIRRKTNNKVDLTNPDVIFRGYILKDIAIFGYDLIGEQPLDKRYYRVYYHPAGLAPTIANSLIRLTKWNGQSLLDPLCGSGTIPIEAALYLREIPPLYRQYDKTFAYQLNPDIIDEIEQSIKWDRKAKILCFDKFVKHMRGAELNCIHARVKDIVKVSKINLEDVDFKLGEKAIDYIITNPPYGIKAADREESEKVHEYLFYQAEYILKDNGVLALLSPHKEWVLKYAEKYNFTLKHEREIYHNKLKVFFFQFLKG

SEQ ID NO: 1020 - DNA, 1059 bp, Nanoarcheum equitans
atgcaacagaattttgttatttacactagggctaaaaaagatgctaaagctttgtcgcatttaaatttaccttttgaaataaaaactttacaaggcataaggggagaagagttaatagaaaccataaaaaatatggatggtttatattataaattgtttttattgggcaagagagatcccgatgtagaagttgatagctatttaactgttatacataaagttccaaaggcaaatgtaagaaatgttaaactacctctattaaaaaaagagctaaaaactgctttatataaattcattaccaagccctttaatatagaatgtgaatgcgatgttggtttatgggataaaggcataatacttttcaaaaaatacgaagatttgtattattctaatggaaaactagttaaaaaaatagatagaattaaaggggaaataatagaatatggcgaagccgatggagaaaaaccctatatagatataaaagaaaaagttaatgaagctatcgaatttattaagcaatttaaagattatgaaattgttatacccttttctggaggaaaagattcaacaacagtcgcaatattagctaaaaaagctaaagtagattttgatttggtttttgtcgatacgggattagagtttaagcaaactttagagtatatcgattatatatcgaaaaaaattaagcctataaatatagtttatgcaggcatagacaaaaaatacaaaatgttcggttttgattatctaaagagaagactatgtactaaagataaaataaccactttatataattatgtaaggaataattacgaaaaccctgttctattggttggggatagactaatagaaagcgaagctagattgtttagacctagaatatttaaagatgaatttttggttgcacaaccaattaagtttttttcttatgctgacgaacaaatattgttagaaaaggaaaacataaagcttaacccattgtacgaaaaaggcttttatagagttggttgtaatgtatgtccctttttagacaattacgaaaaatcaatacctctctaa

SEQ ID NO: 1021 - protein, 352 aa, Nanoarcheum equitans
MQQNFVIYTRAKKDAKALSHLNLPFEIKTLQGIRGEELIETIKNMDGLYYKLFLLGKRDPDVEVDSYLTVIHKVPKANVRNVKLPLLKKELKTALYKFITKPFNIECECDVGLWDKGIILFKKYEDLYYSNGKLVKKIDRIKGEIIEYGEADGEKPYIDIKEKVNEAIEFIKQFKDYEIVIPFSGGKDSTTVAILAKKAKVDFDLVFVDTGLEFKQTLEYIDYISKKIKPINIVYAGIDKKYKMFGFDYLKRRLCTKDKITTLYNYVRNNYENPVLLVGDRLIESEARLFRPRIFKDEFLVAQPIKFFSYADEQILLEKENIKLNPLYEKGFYRVGCNVCPFLDNYEKSIPL

SEQ ID NO: 1022 - DNA, 681 bp, Nanoarcheum equitans
atgaaggaagtaatagctagactaaaaatagggaaagaaacttttgaagtatatgttgattttgaggaagcaataaaattgaaagagggcaaaccatacgataaggaaaaactattgttagtgccagaaatatttaggaatgttaaaactggggaaaggcaaagcgaagaagtattaaaaaaagtattcaaaacaacagatgtttatgtaattgcagaacaaataataaagaaaggccaattgcaaatccctactgagtacaaaagaaaaataaaagaagagttaaaaagaaaaataatagaattaattaggaaaaactatatagatcctagaacaggtttgccatacacatatcaaagaatagaactagctatggaaaaagctaaaataaacatagatataacaaagcccgcagaagcgcaattggaaagcatagtaaaagagttaaaaaagattataccattgaaaggagaaaaaattagaattgtcataaaaataccaaacgaatatatctacaaagcttattcctatattaaatcgtttagaccccaaaaagaagaattttctgacaattattatgcaatattaagtttgcctgcagggatataccaagaatttatagaaaaaatagagaaactaactgagggaaatgcagaaataaaggaattagagaggtattga

SEQ ID NO: 1023 - protein, 226 aa, Nanoarcheum equitans
MKEVIARLKIGKETFEVYVDFEEAIKLKEGKPYDKEKLLLVPEIFRNVKTGERQSEEVLKKVFKTTDVYVIAEQIIKKGQLQIPTEYKRKIKEELKRKIIELIRKNYIDPRTGLPYTYQRIELAMEKAKINIDITKPAEAQLESIVKELKKIIPLKGEKIRIVIKIPNEYIYKAYSYIKSFRPQKEEFSDNYYAILSLPAGIYQEFIEKIEKLTEGNAEIKELERY

SEQ ID NO: 1024 - DNA, 738 bp, Nanoarcheum equitans
atgagttgttggaaaccattatcgaaagaagagtttgaagctatagtaagcaaatataaagacaatccaaaaatagaaatagattatgaaaatctaaaatttatacctaaattcaatgaacaaataaaaaagtattatagcaataaaattaaaggggccaaagtagagaatttggttaacgaagtttacgaagcatggttcgattatattataagaatatatgaaaggcctaaagaaaaagacatattaatgtttttgccctgtgcagcaaaaaagccgtattataaatctaaaactcatagaacaatacaaagagctatttcgggatttcaaatatttaatagaattcatagagttatagtttctaatcccggcataataccatgggaattccatacttattggccctttaatagttatgattggcctgaatgggaagaaaccgaagacataaaaaaactatattattgggttacctataaaagggttaaagaattcctaagaaggcaccaatacaattactatactgtatatatgaaaccggatagcctaacatacaaagccgtaatggacgcatctaaagagttaaatataaaaattattccattgttagatgaaaagacttatgagaaatgtaaagggcaaggtaacccattagttaaagaaccatgcatagagagcctaaaaaataatttaaaacaattgcaaaaacaaatatatgaaggaagtaatagctag

SEQ ID NO: 1025 - protein, 245 aa, Nanoarcheum equitans
MSCWKPLSKEEFEAIVSKYKDNPKIEIDYENLKFIPKFNEQIKKYYSNKIKGAKVENLVNEVYEAWFDYIIRIYERPKEKDILMFLPCAAKKPYYKSKTHRTIQRAISGFQIFNRIHRVIVSNPGIIPWEFHTYWPFNSYDWPEWEETEDIKKLYYWVTYKRVKEFLRRHQYNYYTVYMKPDSLTYKAVMDASKELNIKIIPLLDEKTYEKCKGQGNPLVKEPCIESLKNNLKQLQKQIYEGSNS

SEQ ID NO: 1026 - DNA, 1470 bp, Nanoarcheum equitans
atggaatataatgctgtagtgctagaagcggatagagaagaaataaaaattcttactaaggagaatttacatttagatgattatgtaattatagagaaaaaccaagacaaatggatcggtatagttaaaaacaaaagatttactttgggagaaataggaaaagcttttatcgatctaaaatttgaaagaatattaaaagaaagtgaatggatcgaaaatagaggaaaaaatttgtatgttatacaattattagcccaaaatgatagcgaaataatagatatcccaacacacaatgttttaattaggaaagcaaaagaagaagagatagaaaaagcaattcccaaaggtagtatagaaatagggaaagccagcaatataaaaatatacactaacaaaaatgttatattctcgccccacatcggggtttttggtcaaaccggtagtggtaaatccaatttcgttaaactaatattaaaacaaatcaaaaaagaggatcccgatgctacaataattatattagataggcatggcgaatatgaacaggcttttggagattatgctaaataccccgaaataaaaatagatataaaaaacctaaaccctaacgaatatgtatcattctatgaattattatttaatgtacccccaaattatactaacctacatacagttctttttaatactttagatttgttgtatgaagcggacaattctttgttcgagaatagaactatagcggatttctttgagaccatgtggggaaataaaaatttagaagagtttagagagctaaagcaaaaactaaataggctatctatgaatttggttgaggattatgacaaaacaagaattagattattaagaagatggagagcaatagaaaggtttgccaaagatctattattgctaaaaccaagtataggcaaccaatatataatagaaaggatagttcctaaccaaataaatgtaataagattgaaagcaaaaaggctaagcacaaaaatttatggtgcggtattgagtatactattatacgaaacattattattaaaaactggggaaattgatttatctaacttggaaaaaagcaatatttatatagttatggaagaagctcatgcctatttaaatagaacatatgaagatttgttagaaactgctattactttagctagggagggaagaaaatttaatgtgcatttgttagtagtggcgcaaagcccttctggtttagatagcgaattattgtcacaactaacaactatagcagcctttaggttaactgctagagaagacataaatagagttgcagatatgttagggattagcgcttcttctataaaagggttgcccaaatatacagcttacttttactcggtagaatttaggttaccgatgccattaaaaataaggagtataaaacatgatacaataaagctcataaaagattacgatttgtcccatctatga

SEQ ID NO: 1027 - protein, 489 aa, Nanoarcheum equitans
MEYNAVVLEADREEIKILTKENLHLDDYVIIEKNQDKWIGIVKNKRFTLGEIGKAFIDLKFERILKESEWIENRGKNLYVIQLLAQNDSEIIDIPTHNVLIRKAKEEEIEKAIPKGSIEIGKASNIKIYTNKNVIFSPHIGVFGQTGSGKSNFVKLILKQIKKEDPDATIIILDRHGEYEQAFGDYAKYPEIKIDIKNLNPNEYVSFYELLFNVPPNYTNLHTVLFNTLDLLYEADNSLFENRTIADFFETMWGNKNLEEFRELKQKLNRLSMNLVEDYDKTRIRLLRRWRAIERFAKDLLLLKPSIGNQYIIERIVPNQINVIRLKAKRLSTKIYGAVLSILLYETLLLKTGEIDLSNLEKSNIYIVMEEAHAYLNRTYEDLLETAITLAREGRKFNVHLLVVAQSPSGLDSELLSQLTTIAAFRLTAREDINRVADMLGISASSIKGLPKYTAYFYSVEFRLPMPLKIRSIKHDTIKLIKDYDLSHL

SEQ ID NO: 1028 - DNA, 762 bp, Nanoarcheum equitans
atgcgctatcttggcaaaaagagagttattttatatgatttatctactgaatcgggtaaattttatgttaatgggctagttttacacaataccgattcattattcatttctggggacaaagacaaagtattagaatttttagagaaagtaaataaagaattacccggtaaaatacaattagatttagaagatttctatgttagagggatattcgtaaaaaagaggggtgaacaaaagggggcaaaaaagaaatatgctttattaagcgaacaaggttacataaagctaaggggcttcgaagcagtaagaacagactgggctcccatagttaaagaagtccaaacaaagctattggaaattttgctaaaagaaggtaacatagaaaaagcaagacaatacataaaagaaattattagaaagctaagaaatagagaaataccatgggagaagcttttaattacagaaacgataagaaagcctttagaaaaatacaaagttgaagctcctcatgtggcagcagcaaaaaaatataaaaggttgggctataaagttatgcctggctttagagttagatatttagtggtaggtagcactggaagggtttcagatagaattaaaatagacaaagaagttaggggtaatgaatatgaccccgaatactacatagaaaaacaactattgcctgcagtagagcaaatattagaatctgtaggtattaaagacacattcacaggcaaaaaactaacagatttctttaaatga

SEQ ID NO: 1029 - protein, 253 aa, Nanoarcheum equitans
MRYLGKKRVILYDLSTESGKFYVNGLVLHNTDSLFISGDKDKVLEFLEKVNKELPGKIQLDLEDFYVRGIFVKKRGEQKGAKKKYALLSEQGYIKLRGFEAVRTDWAPIVKEVQTKLLEILLKEGNIEKARQYIKEIIRKLRNREIPWEKLLITETIRKPLEKYKVEAPHVAAAKKYKRLGYKVMPGFRVRYLVVGSTGRVSDRIKIDKEVRGNEYDPEYYIEKQLLPAVEQILESVGIKDTFTGKKLTDFFK

SEQ ID NO: 1030 - DNA, 402 bp, Nanoarcheum equitans
atgaacaggaaagatcatttcctattaacattaccttgggcttacatattttttaggctaaaatatactaaaatacaagcaataattttagctattttatgtgcttatttgacatttttgccagatcttgatttggttttaggaataaagcatagaactataacccattccttgttaatagtgttattattttttattctatattatttaaccaaatttttcttctttgaagtattagccttagctttccttttccatataatagaggattcctttactagtatgggcataaaattgtatccattaaattatagaattagattgggtaaaaccggttattggattaatgtagcatcaataatttctttattattgttcatatggctcgctttaaactattga

SEQ ID NO: 1031 - protein, 133 aa, Nanoarcheum equitans
MNRKDHFLLTLPWAYIFFRLKYTKIQAIILAILCAYLTFLPDLDLVLGIKHRTITHSLLIVLLFFILYYLTKFFFFEVLALAFLFHIIEDSFTSMGIKLYPLNYRIRLGKTGYWINVASIISLLLFIWLALNY

SEQ ID NO: 1032 - DNA, 972 bp, Nanoarcheum equitans
atgctcgaaatatgggaaaaactaataatcccgataatagtttcttttgctattattatattgctagataaattctttttcaaagacgataaagcttttatcttgcttagaaagaacctatacttaggtttcttcattggaactatatatgcggtactgtatttctttaacctaaaaattttgggtgatttggttgctataatttatgcagcaaagcttttggataatattatagttatatatattagaaggattgttggggaatttttcaaaacaaaagaaacagaattcgctataattttgattgcaagaacattcctatggcttaccgcagtacatatggttttatcttcttttggaatagatattgccccattattgacttctttgggtataggttctatagttataggtttggctttgcaaagcacactatctaatttcttttcgggaatggcaatcgctagtgaaggtattttaaaagaaggagatataattgaattgcccgaattaggaattaggggcactataatagatataacttggagaggagtacatattaaaaccataagtgatactatcgctattatacccttcaattacataaacaacaatataataataaacaaaacgaagcattggccttggtattggggtagaataaatttcggtatatcttattatagtgatttagataaagctaaacaattaataagaacaatcctaaaagaaaaaggtttagaaggagatgtaaggtttactaattttggcgataacaatatagaaggagtaatctttttcaaagtttataatattttagatgaattaaaatataaagacgaattaattagagaaataaaaaggcgcttcgatagggaaggcatagaaataagtttcccgaacaggaatatctatttaagaccagaaggcctagacaaagttttagacattataaaacggggtttgcaatag

SEQ ID NO: 1033 - protein, 323 aa, Nanoarcheum equitans
MLEIWEKLIIPIIVSFAIIILLDKFFFKDDKAFILLRKNLYLGFFIGTIYAVLYFFNLKILGDLVAIIYAAKLLDNIIVIYIRRIVGEFFKTKETEFAIILIARTFLWLTAVHMVLSSFGIDIAPLLTSLGIGSIVIGLALQSTLSNFFSGMAIASEGILKEGDIIELPELGIRGTIIDITWRGVHIKTISDTIAIIPFNYINNNIIINKTKHWPWYWGRINFGISYYSDLDKAKQLIRTILKEKGLEGDVRFTNFGDNNIEGVIFFKVYNILDELKYKDELIREIKRRFDREGIEISFPNRNIYLRPEGLDKVLDIIKRGLQ

SEQ ID NO: 1034 - DNA, 375 bp, Nanoarcheum equitans
atgggccattatctaaagattagaagaaaactaaaaagaaagaaacctgaatttttaagaaccaactggtataggaaaaaagctttcagaaatgatccaaaatggagatggggccatggtagggacaataaatttaggcttaaaatgaaaggtaaaccaaggcccccagaaccaggttataggtctcctagaaaagttagaggcctattaccaaatggattaaaaccagttattatacataatgttgaagaactaacaaaaataaaagaaggagaaatagcagttatacaccatgctgtaggtaaaaggaaaaggcaacaaatattagaaaaagcaaaagaattatctatacctattgcaaaccccgttttataa

SEQ ID NO: 1035 - protein, 124 aa, Nanoarcheum equitans
MGHYLKIRRKLKRKKPEFLRTNWYRKKAFRNDPKWRWGHGRDNKFRLKMKGKPRPPEPGYRSPRKVRGLLPNGLKPVIIHNVEELTKIKEGEIAVIHHAVGKRKRQQILEKAKELSIPIANPVL

SEQ ID NO: 1036 - DNA, 282 bp, Nanoarcheum equitans
gtggatataaggaatttagaaaaaagaattaggctattagaagaaaggctatcaattattgaacaactaattgaatcactaaattctcaattggttgagctgtcgaaaaatataaaatataaattgtacacaacagaaaacgatttagaaacaattaaaagaaaaattgatttaatagagaaaaggataaaaattttagagcaagaaatgaattttgttgctacaaaagaggaattaaaggctttagaaaaagaaattgaatacctcaagctaataaaatga

SEQ ID NO: 1037 - protein, 93 aa, Nanoarcheum equitans
MDIRNLEKRIRLLEERLSIIEQLIESLNSQLVELSKNIKYKLYTTENDLETIKRKIDLIEKRIKILEQEMNFVATKEELKALEKEIEYLKLIK

SEQ ID NO: 1038 - DNA, 345 bp, Nanoarcheum equitans
atgatagagctattgttgtatggattattctatattttgggtatatttctcatttcatttttcgcttcccattcatatagcgctttgaattacccaatagagaagcaaattattcatactattgagattttagataaactaaataacaatagcacggtttctataagatacaataatgtaaatgtgaagattacatgtggaactaatattgtttacattggtaactctataatagtgccatctaaaagattgtcatgcgattgtgataagcccccatacaatgttgaaataacattaaaagatggccagataactataaaatgcgagccattaatgaagaagtaa

SEQ ID NO: 1039 - protein, 114 aa, Nanoarcheum equitans
  signal (1)..(28)
MIELLLYGLFYILGIFLISFFASHSYSALNYPIEKQIIHTIEILDKLNNNSTVSIRYNNVNVKITCGTNIVYIGNSIIVPSKRLSCDCDKPPYNVEITLKDGQITIKCEPLMKK

SEQ ID NO: 1040 - DNA, 444 bp, Nanoarcheum equitans
atgcaggtctccttaacaccagtatcaaagaaagacatacatttattagaaacagttttgttagttaaaaccatattcagaccagatgtaatagagatgataaaagacccagcagagagagtaacatggttagactctttagctgttgcagctggggcatttgctagaaggcaagcaggcatgtctattccagaaatagcagaagaacttggaagaagtgaagcaacaattagaaaacatttgaaccaagagacaaaagctggtaaattagttgcagaaacattagaagagctaagaaaggccggaggtaaagtagagttcgaagttatagatgcattagaatacaaagctaaagtaagcaaagtcaaagaagagctatccaaagctttagaagaagttaaagacgctttaaacaaaatcgaagacgctttaaattctctataa

SEQ ID NO: 1041 - protein, 147 aa, Nanoarcheum equitans
MQVSLTPVSKKDIHLLETVLLVKTIFRPDVIEMIKDPAERVTWLDSLAVAAGAFARRQAGMSIPEIAEELGRSEATIRKHLNQETKAGKLVAETLEELRKAGGKVEFEVIDALEYKAKVSKVKEELSKALEEVKDALNKIEDALNSL

SEQ ID NO: 1042 - DNA, 1215 bp, Nanoarcheum equitans
atgtctctctatttaatgcaaatcaaaggttgggtccataaagttagagatttaggtaaaataaagttcctcttaattagggacggttataaaataatgcaagctgtaataaagaagggggagtctcctgattatttattggatttagacataccaatagagagtgctgtagaaatagaaggtgaagaaagggagaccaacggcaaaaaagagatattagtaaaagatttaaagatattagcaaaagcagaaccattgcctatagatcctaaaaaagctactcctaaaaaaaggtttgactatagaattatagatctaaaattgccagaaagacaaaccttatttagattaagggccaaagtacaaaaattctttagagattggtttatggaaaatggttttgtcgaaataaatactcctaaaatagttatcataggagcagaaagcggagcagaggtgttcccagtattgtattttgggaaagaggcttatttaacacaatctccccaattgtataaacaaatgatggtttcggtatttccaaaggtattcgaaattgctttcgcttatagggcagagccatcgaggacttcaagacatttagcagaattcacttctgtagatgctgaaatgggatttataaaagatgaatatgatgttattaatacaataaagaaaatgttaatcgatgttagtgaaaaggcgatgcaaacaaaagaatttgaagaattagccaaacccatagatttgggttttgagattattacttttgatgaagcaaaagaaatagtaaaaggcaatcccaatgaagatttaacaacagaagaagagagaaaattaggagaacattttatggaagagggggtaagctttgtagcagtaaccaaatacccatggagtgaaaggccattttatactatgcgattagatgataacccatcttatacaagaggttttgatattatatttagagggctagaaataataagtggggcacaaagagagcatcgctatgaaaagttattagaaaacataaaagaaaaaggaatagatccaaacaagttagaatattatttaatggctttcaaatatggtatgccccctcatgggggatttggattgggattagagaggtatttaagacaattattaggattagacgatgttagggaagtaatactcttttatagagacatagataggttattgccgtga

SEQ ID NO: 1043 - protein, 404 aa, Nanoarcheum equitans
MSLYLMQIKGWVHKVRDLGKIKFLLIRDGYKIMQAVIKKGESPDYLLDLDIPIESAVEIEGEERETNGKKEILVKDLKILAKAEPLPIDPKKATPKKRFDYRIIDLKLPERQTLFRLRAKVQKFFRDWFMENGFVEINTPKIVIIGAESGAEVFPVLYFGKEAYLTQSPQLYKQMMVSVFPKVFEIAFAYRAEPSRTSRHLAEFTSVDAEMGFIKDEYDVINTIKKMLIDVSEKAMQTKEFEELAKPIDLGFEIITFDEAKEIVKGNPNEDLTTEEERKLGEHFMEEGVSFVAVTKYPWSERPFYTMRLDDNPSYTRGFDIIFRGLEIISGAQREHRYEKLLENIKEKGIDPNKLEYYLMAFKYGMPPHGGFGLGLERYLRQLLGLDDVREVILFYRDIDRLLP

SEQ ID NO: 1044 - DNA, 999 bp, Nanoarcheum equitans
gtgacaaaatatatagaatacaaggggtttaaaattaaagagcgctttgtaaagcattatgaaaaaattgttgatgatatagatttgttcttagattggagtttaagaccattaaaaaaagctattagggttaacacattgaaattaaaagatgatataggtaatttaaacaaagaaaacccatttccaaaactaataagcgccaaagagatactaaaatctttagaagaagaagggtgggagatagaaccaattcctttctataaatatggtttttgggttagacatgaaagcgaatccattggaaatacatggcaattccaaatgggctatatatattcccaagaagcagcatcgatgataccacccttggctttagatttggaagaaaacctattaatattagatatggccgctgctcctggctctaaaacaacacaaatagcaatgcatactcaaaataattcctatataatagctaacgacatttctttagatagaatctctgctttggcagaaaatgttcaaagaacaggctctttagttactattacaatgcaagatggcaggaattttaaaaaatataaaaatacttttgatagaatattattagatgcgccttgctccggggtaggagcattaagaaaatcgtacaaaaccttacaaatgtggaatcctaatatgatagagagactatctaaattgcaaagacaactaatccaagcagcattcgaagctttaaaaccaaatggtattttagtttattccacatgcacattagagcctttggaaaatgaatttgttgtaaattggctattagaaaggtacgaaaatgccaaaatagaaccaataagaatagaaaacctaaaatcgagcgaaccaatattagaatgggagaactataaatttttcgatgatattaaatatacattaagaatttacccttgggacaatgatacagaaggcttttatattgcgaaaataagaaaattggaatga

SEQ ID NO: 1045 - protein, 332 aa, Nanoarcheum equitans
MTKYIEYKGFKIKERFVKHYEKIVDDIDLFLDWSLRPLKKAIRVNTLKLKDDIGNLNKENPFPKLISAKEILKSLEEEGWEIEPIPFYKYGFWVRHESESIGNTWQFQMGYIYSQEAASMIPPLALDLEENLLILDMAAAPGSKTTQIAMHTQNNSYIIANDISLDRISALAENVQRTGSLVTITMQDGRNFKKYKNTFDRILLDAPCSGVGALRKSYKTLQMWNPNMIERLSKLQRQLIQAAFEALKPNGILVYSTCTLEPLENEFVVNWLLERYENAKIEPIRIENLKSSEPILEWENYKFFDDIKYTLRIYPWDNDTEGFYIAKIRKLE

SEQ ID NO: 1046 - DNA, 864 bp, Nanoarcheum equitans
atgatcctatacaatgatgttttcctaaaacatgattgtccccatatagaaaacaaaaatagggttttggccattaaaaaagctttaattgatttgggtataaaatattattctccccaaattgaagaagaccctataaaatatatagaaaaggcccatgataaacaatacatcgaaatgataaaatctctaattgatatggcaaaagagatgggttgtatttatatagatggtgatacttatctatctaaagatagctgggatcctattttgtatgctgtatattattcggtttatgcagtaaataatgattttttatttgctgtagtaagaccgccagggcaccatgcgggtaaatatggtaaagctaatgcaattagccaaggtttttgcatttttaacaatgcagcaattgcagctttaaactataaaggaagggtagcaatagtagatatagatttacatcatggcaatggtacagaagatatagttaagcataacaaaaacattagatattacagcatttacgctaaagacatatacccattacccgataataaaagttatgacaacatatataaatatccattacccatagatgccacaaacgaggattggatttctagttttgatttgttattggctaacctaatagaatgggaccccgataaagtaattgtaagcctcggcttcgatgcgcataaagacgatccattgtcggtatttagaacagattataccatatataaatacgctttccaaaaattggctcaatttaatcctacatatatattagaagggggttataactacgatgttttatataatggtacaaaattactaataaaatttagtcgctcctag

SEQ ID NO: 1047 - protein, 287 aa, Nanoarcheum equitans
MILYNDVFLKHDCPHIENKNRVLAIKKALIDLGIKYYSPQIEEDPIKYIEKAHDKQYIEMIKSLIDMAKEMGCIYIDGDTYLSKDSWDPILYAVYYSVYAVNNDFLFAVVRPPGHHAGKYGKANAISQGFCIFNNAAIAALNYKGRVAIVDIDLHHGNGTEDIVKHNKNIRYYSIYAKDIYPLPDNKSYDNIYKYPLPIDATNEDWISSFDLLLANLIEWDPDKVIVSLGFDAHKDDPLSVFRTDYTIYKYAFQKLAQFNPTYILEGGYNYDVLYNGTKLLIKFSRS

SEQ ID NO: 1048 - DNA, 765 bp, Nanoarcheum equitans
ttgcataatctaaatatgagagtaacctttccagatgcgaaggcattaaagaaaatagttccaattgtagcagatttaattagcgaaggccaatttgttgccacagaagaaggtattaaattagtagctatggatcccgctagcatagctatggttatatgggaaatgaaacccgaggcgtttatcgattatactatagagggagacaaagagattataactgtaagtatggatgatttgaaaactatagttaaaaaattaaaacaaagagagatggttgtttgggaaacagatagagagaaaaacaagctaaaaattttggcaagaggtacaataaaaaagactttttctattccattattagagggagaagaaaccgaaacaccaataccttcattagaatacaataatgtggtagagcttgattctaaagctataaaagaaattatagatgatgcctcagcgatagctgattcactaaaattcaaagcagaacccccatctaagttaataatcaaagcagaaggtgaaatgaaggagatgactgtagagttaacagagggagaagatgcagtagtatcaatagacatacaagaggaagcgtatgcgagctattctatagattatctcaaaaaattcgcaaaagcagcagatgtaagcgatatagcgatattaaagctaaaaacagactatccattatggctagagtatagatatttggataaaatgacattaatattcatattggcgcctaggagcgactaa

SEQ ID NO: 1049 - protein, 254 aa, Nanoarcheum equitans
MHNLNMRVTFPDAKALKKIVPIVADLISEGQFVATEEGIKLVAMDPASIAMVIWEMKPEAFIDYTIEGDKEIITVSMDDLKTIVKKLKQREMVVWETDREKNKLKILARGTIKKTFSIPLLEGEETETPIPSLEYNNVVELDSKAIKEIIDDASAIADSLKFKAEPPSKLIIKAEGEMKEMTVELTEGEDAVVSIDIQEEAYASYSIDYLKKFAKAADVSDIAILKLKTDYPLWLEYRYLDKMTLIFILAPRSD

SEQ ID NO: 1050 - DNA, 630 bp, Nanoarcheum equitans
atgaacccatggttagaatttgcaaaacaagttttaatcggttttgtagtaacaatgtctgttatagtggttgcatatttggtttctaaacacataatagagaaagccgtaagactattcttagaatcgttaggaatagacgatatagcgaaagaattggaaatatctaaagcattaggtagatataaattaagtgaaatattagccattgcagcgaggtggtatgcctttttctatatattaacagccgcagcaggggtatttaatttacaagctttgataccagtattaggtatgctattatcttttgttggcaatgtgattgctgcagcattaattttattgattttctatttagctggttattatataaaaaccaaagcccaagaaagcggtagcccctctttggctatgttaggggaaggtggttatttggttatattgtttataggtattgtttctgcattgaaacaattaaacttacaaggaatagatttaatatatcaaataataaccatagcggtagcagcgttttttgtttccctatctatagcttttggagttgccttgggtttagcattaaaagataaagccgcgaaagagttggaaaaacttttagaaaacaaatag

SEQ ID NO: 1051 - protein, 209 aa, Nanoarcheum equitans
MNPWLEFAKQVLIGFVVTMSVIVVAYLVSKHIIEKAVRLFLESLGIDDIAKELEISKALGRYKLSEILAIAARWYAFFYILTAAAGVFNLQALIPVLGMLLSFVGNVIAAALILLIFYLAGYYIKTKAQESGSPSLAMLGEGGYLVILFIGIVSALKQLNLQGIDLIYQIITIAVAAFFVSLSIAFGVALGLALKDKAAKELEKLLENK

SEQ ID NO: 1052 - DNA, 483 bp, Nanoarcheum equitans
atgatatggatagttaaaactgctggaggaaaagaagaaatagttgcagatttaatagaggcaaaagctaaaaagctgggtgcgaatgtatattctatagttattgccccaggaattaaaggttatatttttgtggaggcagacaaatatgatactgtaaatgaattagtccacgatataaaacatgttagaaaagttttgcctaaacccatagaagttaaagacatagaaaaattcataaaagcagagccattggtaacaaaagtaaatgttggcgacatcgtagaagtaatagctggcccattgaagggctctagagggaaggtagtagcattcaatgaaaatacaggagaggtaacaatagaaacattagattcggtaatacctttgcctgttacagtatctattcatgatataaaattagttgagcccagcaaagaagagaagaaagaagaagtcgaagagtttttgtttttcgaatag

SEQ ID NO: 1053 - protein, 160 aa, Nanoarcheum equitans
MIWIVKTAGGKEEIVADLIEAKAKKLGANVYSIVIAPGIKGYIFVEADKYDTVNELVHDIKHVRKVLPKPIEVKDIEKFIKAEPLVTKVNVGDIVEVIAGPLKGSRGKVVAFNENTGEVTIETLDSVIPLPVTVSIHDIKLVEPSKEEKKEEVEEFLFFE

SEQ ID NO: 1054 - DNA, 312 bp, Nanoarcheum equitans
ttgcgaaagaaacttattaaaattctgcaagatttattagatatatctgatactgaattagaaatttatagttttatactaaacaactctagggtaaccgttaaagatattgtaaacaatctcaaaataagcaaaaaaactgcacatgaaaaactaaaaaaactaattagtttaggattaatagataaaaaaatcgataagaaaggttatatttacgaagcgaaggctgataaatatacaatactatcattgttaaaaaaacaattggaaaaaatatataaagagtttgaagaggaattttctaaattgtag

SEQ ID NO: 1055 - protein, 103 aa, Nanoarcheum equitans
MRKKLIKILQDLLDISDTELEIYSFILNNSRVTVKDIVNNLKISKKTAHEKLKKLISLGLIDKKIDKKGYIYEAKADKYTILSLLKKQLEKIYKEFEEEFSKL

SEQ ID NO: 1056 - DNA, 2232 bp, Nanoarcheum equitans
atggtttccgaaaaaacaatggcagagagagttttagccctaatgggtaggccaaacaatataagaaatatcggtattatagcgcatatacatcatggtaaaacaacactaacagacaaccttttagcaggggcaggaatgcttagcgaagagctcgctggagatgcaatgtttacttggtggcatgaacaagagagagaaagagaaatgacaatatatggagcagcagtttcaatggttcacgaatatgagggagatgattatttgattaatttaattgatactcccgggcatgtcgaatttgggggcgaagtaactagagcagtaagagctatagatggagcagttgtagtagtagatttcgtagatggtataatgccccaaactgaaactgtattaaaacaagctttaagagaatatgttaaacccgttttattcataaacaaagttgatagagcaataaaagaattgcaattacctccaaataaaataatggaaaggttagcagaaattgtagttggagtaaacgatttaattgaaagatatgccccagaggagtttaaagataaatggaaagttagtgtacaaaatgggacagttgcttttggttccgctttgcataattgggcattaagcgttccatatatgcaaaaaacaggtatagggtttaaacaaatagcagaaatttataatactgcagccgatgctaaagagataagaagaagggtatgggaaatagccccattgtatagagtagtattagatatggttgttagacatttgccttctccaaaagaagcacaaaaatatagagtgcctaaactatggcatggtgatctaaatagcaaatatggtaaagccatgctagaagcagatccaaacgggccagctgtagcagtagtaactaaagttattgtcgataaaacatctaaacaagaaactgccatagcgagggtttggtctggcacaataaggagaggtatggaagtttggctattaaatgctaacaaaaaagtaagactccaacaagttggtgtatttaagggtatacaaaaaatacaaatagaagaagcgaaagctggaaacattattgctattagtggagtaagagatttgcaaagtggtgaaaccattgtagaaccagaaccagatgggtctaaaccaaacatacccccattcgaagcaataaagcatatattcgatccagtagtaactaaagctatagaacccaaagatccaagagacttgccaaaactaatagaagtattgaaactaattcaaaaagaagatcccacattaaaagtagaaatagaccaagaaagtggacaaatactaatctctggtttaggagacttacatttggaaatagttgaatatagaataaagaacgatttcaaagtagatataataacatctaatccaatagttgtatatagagaaagcgttaaaggacaagccggcccagtagaaggtaaatctccaaacaaattaaacaaattctatattactgttgagaagatgcccgatgaattatattggaagctaagggagaaactattaaaaggcgaattgccagaaggtaaaataaagaaaatgaacgaagatataataaaacatttgatgtctttaggttttacaagggaagaagcacaaaggtgtaaggtaatctatagagaaaacatgttcttcgatatgactagaggtataatacatattggagaagtaatagatatggttatggacgcttttatgcaagttatggaccatggtccaatagcatgggaaccatgtattggattaatagtaaagctaaccgatgcacaattgcatgaggatgctatacatagggggcctggtcaagttattcctgcagtaagggaagcaattaaattagccatgaaagatgcaggccttgtattatatgaaccagtacaagtaattttggttgatgtgcccccagattacattggggatgtcacagctttaataaactctaggagaggggcaatattagatatacaaaccgaagaagatagggcattgattaaagctaaagtcccagttagagagatgataggctttacagatactctaaggtctgccacttctggaaggggagtatggtatctggtagaccaagtttatgaaccagtaccaagagaattattcgaccaaatagttagagaaataagacaaagaaaaggcttaccattagatgcagatatagtctaa

SEQ ID NO: 1057 - protein, 743 aa, Nanoarcheum equitans
MVSEKTMAERVLALMGRPNNIRNIGIIAHIHHGKTTLTDNLLAGAGMLSEELAGDAMFTWWHEQEREREMTIYGAAVSMVHEYEGDDYLINLIDTPGHVEFGGEVTRAVRAIDGAVVVVDFVDGIMPQTETVLKQALREYVKPVLFINKVDRAIKELQLPPNKIMERLAEIVVGVNDLIERYAPEEFKDKWKVSVQNGTVAFGSALHNWALSVPYMQKTGIGFKQIAEIYNTAADAKEIRRRVWEIAPLYRVVLDMVVRHLPSPKEAQKYRVPKLWHGDLNSKYGKAMLEADPNGPAVAVVTKVIVDKTSKQETAIARVWSGTIRRGMEVWLLNANKKVRLQQVGVFKGIQKIQIEEAKAGNIIAISGVRDLQSGETIVEPEPDGSKPNIPPFEAIKHIFDPVVTKAIEPKDPRDLPKLIEVLKLIQKEDPTLKVEIDQESGQILISGLGDLHLEIVEYRIKNDFKVDIITSNPIVVYRESVKGQAGPVEGKSPNKLNKFYITVEKMPDELYWKLREKLLKGELPEGKIKKMNEDIIKHLMSLGFTREEAQRCKVIYRENMFFDMTRGIIHIGEVIDMVMDAFMQVMDHGPIAWEPCIGLIVKLTDAQLHEDAIHRGPGQVIPAVREAIKLAMKDAGLVLYEPVQVILVDVPPDYIGDVTALINSRRGAILDIQTEEDRALIKAKVPVREMIGFTDTLRSATSGRGVWYLVDQVYEPVPRELFDQIVREIRQRKGLPLDADIV

SEQ ID NO: 1058 - DNA, 1080 bp, Nanoarcheum equitans
atggatatactacaaaaactaaaacaattgggagaaaaaatatataatgaattcttaaaaaatggtgatccaaggatagaattcttaactaggggtaatattaaaactgtagagtatgatgaagaaaaggatataattaaattaaaggagaagcaatctgtaagaaggttttttgatgttggagaaacaaggaggtttacccaaactttattagttgcggcgttggccaaagaattggttgaatctaataagcatgcttcattaagagaagtgtactaccaattgaaacacacaatcccttatattaatgaaaacacatttgacgaacaaagcgaaagcgattctgttatcgaagatttggaaagagcgttaagagcgataagagaacaatttggtatagtggcagatagaaaaggctatctatatggagacataacattgaaagacagaaataggggagacgaatggaattgctctaagctaggccttgggggttggggaataccctcaacaatagaagaaatagatatagttgatgtaaatgcagattatgttttagttgttgagaaagacgctatgtttgagagattaatcgaggaaaggtttcccgaaaagaatagagctttattgattgctactaagggacaaccttcgagagggacgagaaggctaataagaaaacttagatacgaagtagggttgcctgtttatgtatttactgatggcgacccctgggggttctatatatattcggtaatcaaaagaggttctatgaatttagcaatgttttctgagcaattggcaacaccagatgctaagtttatcggtttaactatagatgatgtaataaaatacgatctgaaagatgtagcaatacaattaaagcccatagatgtaaaaagagtaaaagaactaatggaatatccatggtttaaaaacaaggaatggcaaagacaattcaacaaaatgctaaaactaaatattaaagctgaacaagatgctttggctaagcattctttagagtttgtagcgaacaaatatttgcccgaaaaaatcgaaaagggagaatttttgccttag

SEQ ID NO: 1059 - protein, 359 aa, Nanoarcheum equitans
MDILQKLKQLGEKIYNEFLKNGDPRIEFLTRGNIKTVEYDEEKDIIKLKEKQSVRRFFDVGETRRFTQTLLVAALAKELVESNKHASLREVYYQLKHTIPYINENTFDEQSESDSVIEDLERALRAIREQFGIVADRKGYLYGDITLKDRNRGDEWNCSKLGLGGWGIPSTIEEIDIVDVNADYVLVVEKDAMFERLIEERFPEKNRALLIATKGQPSRGTRRLIRKLRYEVGLPVYVFTDGDPWGFYIYSVIKRGSMNLAMFSEQLATPDAKFIGLTIDDVIKYDLKDVAIQLKPIDVKRVKELMEYPWFKNKEWQRQFNKMLKLNIKAEQDALAKHSLEFVANKYLPEKIEKGEFLP

SEQ ID NO: 1060 - DNA, 654 bp, Nanoarcheum equitans
atggattttgaggctatagccaaaaaattcggtctaaaaaagcggtatgtggaacatttattatattattcctatttctacaaacctgtaaactttgataaaatagaaatacctaaggaaaacttgcaatggtgggccagagagatattaaaactacaaagacctacaaaagagagattgcctttttatgaaaaaatatgggagaaacataaagaatttagcgatactataatagatatagggagtgggcttaacccaatatctttattattaatagattggagaccaaaagaatatatcgctttagatatcgcagatagtattgttaattttttaaacaaactggattttcttccaataaaggctaaaaaattcgattttcttagcgaaattccaaaagagaagggtttaatactattatggaaagtaatcccaattatggataaattctatggttttagatatgtgaaaaactatttagaatcattaagaggaaacataatttctataagttttcctagaaaaagtttgagcggtaaaaagctaattggtagggcgtggcgctattatattaaaagggcttctccctataaaattatagacgaatttgaaaccgataatgaatatttcataatattcgatgctacagaatag

SEQ ID NO: 1061 - protein, 217 aa, Nanoarcheum equitans
MDFEAIAKKFGLKKRYVEHLLYYSYFYKPVNFDKIEIPKENLQWWAREILKLQRPTKERLPFYEKIWEKHKEFSDTIIDIGSGLNPISLLLIDWRPKEYIALDIADSIVNFLNKLDFLPIKAKKFDFLSEIPKEKGLILLWKVIPIMDKFYGFRYVKNYLESLRGNIISISFPRKSLSGKKLIGRAWRYYIKRASPYKIIDEFETDNEYFIIFDATE

SEQ ID NO: 1062 - DNA, 960 bp, Nanoarcheum equitans
ttgcggtcgatgatagaggtaaggtttcccctaataatgataaagctagatccctctattctatataaattgaaaactaagcattataaagtattgggcttcatttatacagttatagcttttgcagggataggttttacaattgcttttttattaaaatcgctatacgattttatttttagacccaataattttactcctgttgttaccccattaattcccggtatagaaatagggggattgaagttaccattaattgaaggcataattgctatttctatagccgcattagttcatgaattggcccatgcacaaatgttagtttctctgaatagaaaaataaaaagttggggtttagctttgctgggccctattttagcagcatttgttgaaccagatgaagaagaattcaaaaaggacaaaccaataaatagaattatggttctctctgctgggcccgcagttaatataatattaggattaatttttttaggtttatccaatattctatttccgtatttccatcaatacaaatgtttaaaattggtaaaaactactaatccagatttagaaggagtaaaatgcatctatagtatagacaatacaaatgttacaataaaaaacataagagatattatatataagcataaacctggcgatagagttatagtaaatactgacaaaggggaaatagtgacgaaattaaaagagaaaaatgggaaaccatttttaggagtatgggtaataccgtattatattaaaaagggcttttatttcttgtattcgctaatatcggtattgggcatagtaaatataggaattgggttagctaatttggttccattgtttataacagacggggcccaaatattaagggaattcctaaacaaatattgggttgaaataaatagctttttcctaactatagtgctaataaatattatatggtctattctgtag

SEQ ID NO: 1063 - protein, 319 aa, Nanoarcheum equitans
MRSMIEVRFPLIMIKLDPSILYKLKTKHYKVLGFIYTVIAFAGIGFTIAFLLKSLYDFIFRPNNFTPVVTPLIPGIEIGGLKLPLIEGIIAISIAALVHELAHAQMLVSLNRKIKSWGLALLGPILAAFVEPDEEEFKKDKPINRIMVLSAGPAVNIILGLIFLGLSNILFPYFHQYKCLKLVKTTNPDLEGVKCIYSIDNTNVTIKNIRDIIYKHKPGDRVIVNTDKGEIVTKLKEKNGKPFLGVWVIPYYIKKGFYFLYSLISVLGIVNIGIGLANLVPLFITDGAQILREFLNKYWVEINSFFLTIVLINIIWSIL

SEQ ID NO: 1064 - DNA, 642 bp, Nanoarcheum equitans
atggtatctgtagaccaagtaaaaaaagctagagagggcaaaaaaagaaggtttacccaaacattcgaactaatattcaacctaaaaaatgtagatttaaggaaatataggctttcaacctatatagttttacctagagggaggggcaaaaagatgccaattctcgctatcgtgggcccagaaaataaagaattggcagaaaaatattttgacatagtattaactagagaagatctaaaacaattagataaaaggacagctaaaaaattagctaaaaggcattaccatgtcgtagcgcaagcagatttaatgccagaattaggtaaatctttgttaggtagattcctaggaattaggggaaagatgccaaacccaaaagcaggccaaatattgcctccaaatttgaatgaaaaaatgttagaggcattaagagaaaagctaaacaatactgtaagagttaatgttaaaaagcatgttacctttggagtaccaataggcacagaagatatggaagatgaagctatagcagagaatgcagatactgttattaatgaaataatatcccaattacctcaaggcaaacaaaatatagatagtgtgtatctaaaactaactatggggccagcggttagagttttataa

SEQ ID NO: 1065 - protein, 213 aa, Nanoarcheum equitans
MVSVDQVKKAREGKKRRFTQTFELIFNLKNVDLRKYRLSTYIVLPRGRGKKMPILAIVGPENKELAEKYFDIVLTREDLKQLDKRTAKKLAKRHYHVVAQADLMPELGKSLLGRFLGIRGKMPNPKAGQILPPNLNEKMLEALREKLNNTVRVNVKKHVTFGVPIGTEDMEDEAIAENADTVINEIISQLPQGKQNIDSVYLKLTMGPAVRVL

SEQ ID NO: 1066 - DNA, 285 bp, Nanoarcheum equitans
atggctaaatattctattataatggaaaagaaaaacaaactattcgatagaacagaatatattatacaagtggagcatccaaaggaaaaaaccccaactagggaggaggcaaaagaaaaaatagcagagatgcttaatgtcgacaaaaataaattagttattaaaaagattgtatctaaatatggcttaccctatagctttatatacgctagggtttatgataacatcgataccgcaaaaagagtagagctaaaacaaattttaagaaggaataacttacaataa

SEQ ID NO: 1067 - protein, 94 aa, Nanoarcheum equitans
MAKYSIIMEKKNKLFDRTEYIIQVEHPKEKTPTREEAKEKIAEMLNVDKNKLVIKKIVSKYGLPYSFIYARVYDNIDTAKRVELKQILRRNNLQ

SEQ ID NO: 1068 - DNA, 1146 bp, Nanoarcheum equitans
atggttaaagagcaaataataaatattgcttctaaaaatcctgaaaaggtttatcctattgctgctctaaatgaaaggggtttcaaaagaaaacaatgcaaaatatgtaaaaggtatttttggtctatagagaatagagaaacatgtgcagaccatgagccatattcttttataggcaaaccaataaaaccgatagaatataaaaaactatgggatttaactaaaaaatttttcagcgaaagagggtatgttccattaaatagttatcctgtcgtagcgagatggagagatgatttagattttgttattgcctctatagttgatttccaaccccacatagttaatggagaaatagagcctatagcaaatagaataataatcccccaatactgtttaaggtttgatgatttacccttggttggctatagtgggagacattttactagctttataatgattggccaacatgcttttgaaaaacccgaaaattataatccttacaaatatttaagagatttgttagattattttaattatttaggtttcaaggataaccaattggttatacatgaagatgcttgggctggcggaggtaatgcgggcccttcattagagatattctataccggtttagagttggccaaccaagtatatatggtttacaaagtaatagataataaactaattcctatggagaatataagagttttagatatgggtgcgggtcatgaaagaatagtttgggctctaaatggttctataaacgcttatgaagttacttttccaaatagtttgaaatatttgagaaattatttcgatttagatagggaaatcaaagatatttattatttgggatataaaatagaaagtaaggacgatataattaatgtggcaaaagaatatgccgaaaactttggattcgatttggactatgtattaaaagcctgggaagaatatgctaaaatgtatatagtagcagaccatttgagaagtgtttatttagcgataaaagatggaatgctcccatctaatacggggggaggttataatattagaatattgttaagaagggttttcaaaattatggaagaaaagggctttgaaatagaaaaagttatagagctaatacaaaaagatttattgtaa

SEQ ID NO: 1069 - protein, 381 aa, Nanoarcheum equitans
MVKEQIINIASKNPEKVYPIAALNERGFKRKQCKICKRYFWSIENRETCADHEPYSFIGKPIKPIEYKKLWDLTKKFFSERGYVPLNSYPVVARWRDDLDFVIASIVDFQPHIVNGEIEPIANRIIIPQYCLRFDDLPLVGYSGRHFTSFIMIGQHAFEKPENYNPYKYLRDLLDYFNYLGFKDNQLVIHEDAWAGGGNAGPSLEIFYTGLELANQVYMVYKVIDNKLIPMENIRVLDMGAGHERIVWALNGSINAYEVTFPNSLKYLRNYFDLDREIKDIYYLGYKIESKDDIINVAKEYAENFGFDLDYVLKAWEEYAKMYIVADHLRSVYLAIKDGMLPSNTGGGYNIRILLRRVFKIMEEKGFEIEKVIELIQKDLL

SEQ ID NO: 1070 - DNA, 804 bp, Nanoarcheum equitans
ttgcaagcaatgatattcgttactgatataatagaatatttgatttgccctgttaggttatatttaaagaaaataaagaatataaaaatagagaacaagcgattattaaggggcaaaatattgcatagagcttttgaattgttcgattcttttgaaaaagaatatttaaacgatttggaattacctatagaattagaaagatttacaaaagactatataataatggcgaataggggtttggttagggctattttagaatttaatgctccccaaacttatattttagaactaaaagacataatccatagagaagccaaatttagagcaaactatgtttggtcttttatagaaaaatacggagaacaattttacaacaaaattaatccaattataaaaagtgagattttgctaaaatataacgatttagttggaagaatagataggcttgaaaaatacaaaagtggtaggctaataccaatagaaataaaaactggcacttataaagaatatcataaaatccaattggcgggctatgccatattgttagaaaaaaactataatactaaaatagatgttggcttattgtattacacaaaaaccgatagatatatagaagtagagttagatccatataaagagttatttttagaattatatgaaaaagtcaaacttttcttagacagcccaaggatgatcgctaataaaaaatattgccaatactgcgattataaatatttctgccctgtatataataacaaaaagctcgaattttttaataatacagacaaaaatttaaatggttaa

SEQ ID NO: 1071 - protein, 267 aa, Nanoarcheum equitans
MQAMIFVTDIIEYLICPVRLYLKKIKNIKIENKRLLRGKILHRAFELFDSFEKEYLNDLELPIELERFTKDYIIMANRGLVRAILEFNAPQTYILELKDIIHREAKFRANYVWSFIEKYGEQFYNKINPIIKSEILLKYNDLVGRIDRLEKYKSGRLIPIEIKTGTYKEYHKIQLAGYAILLEKNYNTKIDVGLLYYTKTDRYIEVELDPYKELFLELYEKVKLFLDSPRMIANKKYCQYCDYKYFCPVYNNKKLEFFNNTDKNLNG

SEQ ID NO: 1072 - DNA, 540 bp, Nanoarcheum equitans
atgctagaattattagcagggtttaagcaatctattttgtatgttctagcccaattcaaaaaacctgaatatgcaactagttatacaataaaattggttaaccccttttattatatatccgactctcttaacgttataactagtactaaagaagataaggttaattataaagttagtttatccgatatcgcttttgattttccatttaaatttcctatagttgcaatagtagaagggaaagcaaatagggaatttacatttataatagataggcaaaacaaaaaactaagttatgatctaaagaaaggtattatctatatacaggatgcaaccattattcctaatggtattaaaataactgtaaatgggctagctgaattgaaaaacataaaaattaatcctaatgatccaagtataacagtacaaaaagttgttggagaacaaaacacatatataatcaaaacttctaaagatagtgtaaaaataacaatttctgcagattttgttgttaaagcggaaaagtggttgtttatccaataa

SEQ ID NO: 1073 - protein, 179 aa, Nanoarcheum equitans
MLELLAGFKQSILYVLAQFKKPEYATSYTIKLVNPFYYISDSLNVITSTKEDKVNYKVSLSDIAFDFPFKFPIVAIVEGKANREFTFIIDRQNKKLSYDLKKGIIYIQDATIIPNGIKITVNGLAELKNIKINPNDPSITVQKVVGEQNTYIIKTSKDSVKITISADFVVKAEKWLFIQ

1. An isolated or recombinant nucleic acid comprising a nucleic acid sequence having at least 50% sequence identity to SEQ ID NO:1, SEQ ID NO:2, SEQ ID NO:4, SEQ ID NO:6, SEQ ID NO:8, SEQ ID NO:10, SEQ ID NO:12, SEQ ID NO:14, SEQ ID NO:16, SEQ ID NO:18, SEQ ID NO:20, SEQ ID NO:22, SEQ ID NO:24, SEQ ID NO:26, SEQ ID NO:28, SEQ ID NO:30, SEQ ID NO:32, SEQ ID NO:34, SEQ ID NO:36, SEQ ID NO:38, SEQ ID NO:40, SEQ ID NO:42, SEQ ID NO:44, SEQ ID NO:46, SEQ ID NO:48, SEQ ID NO:50, SEQ ID NO:52, SEQ ID NO:54, SEQ ID NO:56, SEQ ID NO:58, SEQ ID NO:60, SEQ ID NO:62, SEQ ID NO:64, SEQ ID NO:66, SEQ ID NO:68, SEQ ID NO:70, SEQ ID NO:72, SEQ ID NO:74, SEQ ID NO:76, SEQ ID NO:78, SEQ ID NO:80, SEQ ID NO:82, SEQ ID NO:84, SEQ ID NO:86, SEQ ID NO:88, SEQ ID NO:90, SEQ ID NO:92, SEQ ID NO:94, SEQ ID NO:96, SEQ ID NO:98, SEQ ID NO:100, SEQ ID NO:102, SEQ ID NO:104, SEQ ID NO:106, and all nucleic acids disclosed in the SEQ ID listing, which include all even numbered SEQ ID NO:s from SEQ ID NO:2 through SEQ ID NO:1073, over a region of at least about 100 residues, wherein the nucleic acid encodes at least one polypeptide having an enzyme, structural or binding activity, and the sequence identities are determined by analysis with a sequence comparison algorithm or by a visual inspection.

2-7. (canceled)

8. The isolated or recombinant nucleic acid of claim 1, wherein the enzyme, structural or binding activity comprises a recombinase activity, a helicase activity, a DNA replication activity, a DNA recombination activity, an isomerase, a transisomerase activity, topoisomerase activity, a methyl transferase activity, an aminotransferase activity, a uracil-5-methyl transferase activity, a cysteinyl tRNA synthetase activity, a hydrolase, an esterase activity, a phosphoesterase activity, an acetylmuramyl pentapeptide phosphotransferase activity, a glycosyltransferase activity, an acetyltransferase activity, an acetylglucosamine phosphate transferase activity, a centromere binding activity, a telomerase activity, a transcriptional regulatory activity, a heat shock protein activity, a protease activity, a proteinase activity, a peptidase activity, a carboxypeptidase activity, an endonuclease activity, an exonuclease activity, a RecB family exonuclease activity, a polymerase activity, a carbamoyl phosphate synthetase activity, a methyl-thioadenine synthetase activity, an oxidoreductase activity, an Fe—S oxidoreductase activity, a flavodoxin reductase activity, a permease activity, a thymidylate activity, a dehydrogenase activity, a pyrophosphorylase activity, a coenzyme metabolism activity, a dinucleotide-utilizing enzyme activity, a molybdopterin or thiamine biosynthesis activity, a beta-lactamase activity, a ligand binding activity, an ion transport activity, an ion metabolism activity, a tellurite resistance protein activity, an inorganic ion transport activity, a nucleotide transport activity, a nucleotide metabolism activity, an actin, a myosin activity, a lipase activity or a lipid acyl hydrolase (LAH) activity, a cell envelop biogenesis activity, an outer membrane synthesis activity, a ribosomal structure synthesis activity, a translational processing activity, a transcriptional initiation activity, a TATA-binding activity, a signal transduction activity, an energy metabolism activity, an ATPase activity, an information storage activity, a processing activity, or a combination thereof.

9-23. (canceled)

24. An isolated or recombinant nucleic acid, wherein the nucleic acid comprises a sequence that hybridizes under stringent conditions to a nucleic acid comprising SEQ ID NO:1, SEQ ID NO:2, SEQ ID NO:4, SEQ ID NO:6, SEQ ID NO:8, SEQ ID NO:10, SEQ ID NO:12, SEQ ID NO:14, SEQ ID NO:16, SEQ ID NO:18, SEQ ID NO:20, SEQ ID NO:22, SEQ ID NO:24, SEQ ID NO:26, SEQ ID NO:28, SEQ ID NO:30, SEQ ID NO:32, SEQ ID NO:34, SEQ ID NO:36, SEQ ID NO:38, SEQ ID NO:40, SEQ ID NO:42, SEQ ID NO:44, SEQ ID NO:46, SEQ ID NO:48, SEQ ID NO:50, SEQ ID NO:52, SEQ ID NO:54, SEQ ID NO:56, SEQ ID NO:58, SEQ ID NO:60, SEQ ID NO:62, SEQ ID NO:64, SEQ ID NO:66, SEQ ID NO:68, SEQ ID NO:70, SEQ ID NO:72, SEQ ID NO:74, SEQ ID NO:76, SEQ ID NO:78, SEQ ID NO:80, SEQ ID NO:82, SEQ ID NO:84, SEQ ID NO:86, SEQ ID NO:88, SEQ ID NO:90, SEQ ID NO:92, SEQ ID NO:94, SEQ ID NO:96, SEQ ID NO:98, SEQ ID NO:100, SEQ ID NO:102, SEQ ID NO:104, SEQ ID NO:106, and all nucleic acids disclosed in the SEQ ID listing, which include all even numbered SEQ ID NO:s from SEQ ID NO:2 through SEQ ID NO:1073, wherein the nucleic acid encodes a polypeptide having an enzyme, structural or binding activity.

25-26. (canceled)

27. A nucleic acid probe for identifying a nucleic acid encoding a polypeptide with enzyme, structural or binding activity, wherein the probe comprises at least 10 consecutive bases of a sequence comprising SEQ ID NO:1, SEQ ID NO:2, SEQ ID NO:4, SEQ ID NO:6, SEQ ID NO:8, SEQ ID NO:10, SEQ ID NO:12, SEQ ID NO:14, SEQ ID NO:16, SEQ ID NO:18, SEQ ID NO:20, SEQ ID NO:22, SEQ ID NO:24, SEQ ID NO:26, SEQ ID NO:28, SEQ ID NO:30, SEQ ID NO:32, SEQ ID NO:34, SEQ ID NO:36, SEQ ID NO:38, SEQ ID NO:40, SEQ ID NO:42, SEQ ID NO:44, SEQ ID NO:46, SEQ ID NO:48, SEQ ID NO:50, SEQ ID NO:52, SEQ ID NO:54, SEQ ID NO:56, SEQ ID NO:58, SEQ ID NO:60, SEQ ID NO:62, SEQ ID NO:64, SEQ ID NO:66, SEQ ID NO:68, SEQ ID NO:70, SEQ ID NO:72, SEQ ID NO:74, SEQ ID NO:76, SEQ ID NO:78, SEQ ID NO:80, SEQ ID NO:82, SEQ ID NO:84, SEQ ID NO:86, SEQ ID NO:88, SEQ ID NO:90, SEQ ID NO:92, SEQ ID NO:94, SEQ ID NO:96, SEQ ID NO:98, SEQ ID NO:100, SEQ ID NO:102, SEQ ID NO:104, SEQ ID NO:106, and all nucleic acids disclosed in the SEQ ID listing, which include all even numbered SEQ ID NO:s from SEQ ID NO:2 through SEQ ID NO:1073, wherein the probe identifies the nucleic acid by binding or hybridization.

28. (canceled)

29. A nucleic acid probe for identifying a nucleic acid encoding a polypeptide having an enzyme, structural or binding activity, wherein the probe comprises a nucleic acid comprising at least about 10 consecutive residues of SEQ ID NO:1, SEQ ID NO:2, SEQ ID NO:4, SEQ ID NO:6, SEQ ID NO:8, SEQ ID NO:10, SEQ ID NO:12, SEQ ID NO:14, SEQ ID NO:16, SEQ ID NO:18, SEQ ID NO:20, SEQ ID NO:22, SEQ ID NO:24, SEQ ID NO:26, SEQ ID NO:28, SEQ ID NO:30, SEQ ID NO:32, SEQ ID NO:34, SEQ ID NO:36, SEQ ID NO:38, SEQ ID NO:40, SEQ ID NO:42, SEQ ID NO:44, SEQ ID NO:46, SEQ ID NO:48, SEQ ID NO:50, SEQ ID NO:52, SEQ ID NO:54, SEQ ID NO:56, SEQ ID NO:58, SEQ ID NO:60, SEQ ID NO:62, SEQ ID NO:64, SEQ ID NO:66, SEQ ID NO:68, SEQ ID NO:70, SEQ ID NO:72, SEQ ID NO:74, SEQ ID NO:76, SEQ ID NO:78, SEQ ID NO:80, SEQ ID NO:82, SEQ ID NO:84, SEQ ID NO:86, SEQ ID NO:88, SEQ ID NO:90, SEQ ID NO:92, SEQ ID NO:94, SEQ ID NO:96, SEQ ID NO:98, SEQ ID NO:100, SEQ ID NO:102, SEQ ID NO:104, SEQ ID NO:106, and all nucleic acids disclosed in the SEQ ID listing, which include all even numbered SEQ ID NO:s from SEQ ID NO:2 through SEQ ID NO:1073, wherein the sequence identities are determined by analysis with a sequence comparison algorithm or by visual inspection.

30. (canceled)

31. An amplification primer sequence pair for amplifying a nucleic acid encoding a polypeptide having an enzyme, structural or binding activity, wherein the primer pair is capable of amplifying a nucleic acid comprising a sequence as set forth in claim 1, or a subsequence thereof.

32. (canceled)

33. An amplification primer pair, wherein the primer pair comprises a first member having a sequence as set forth by about the first (the 5′) 12, 13, 14, 15, 16, 17, 18, 19, 20, 21, 22, 23, 24, 25, 26, 27, 28, 29, 30 or more residues of SEQ ID NO:1, SEQ ID NO:2, SEQ ID NO:4, SEQ ID NO:6, SEQ ID NO:8, SEQ ID NO:10, SEQ ID NO:12, SEQ ID NO:14, SEQ ID NO:16, SEQ ID NO:18, SEQ ID NO:20, SEQ ID NO:22, SEQ ID NO:24, SEQ ID NO:26, SEQ ID NO:28, SEQ ID NO:30, SEQ ID NO:32, SEQ ID NO:34, SEQ ID NO:36, SEQ ID NO:38, SEQ ID NO:40, SEQ ID NO:42, SEQ ID NO:44, SEQ ID NO:46, SEQ ID NO:48, SEQ ID NO:50, SEQ ID NO:52, SEQ ID NO:54, SEQ ID NO:56, SEQ ID NO:58, SEQ ID NO:60, SEQ ID NO:62, SEQ ID NO:64, SEQ ID NO:66, SEQ ID NO:68, SEQ ID NO:70, SEQ ID NO:72, SEQ ID NO:74, SEQ ID NO:76, SEQ ID NO:78, SEQ ID NO:80, SEQ ID NO:82, SEQ ID NO:84, SEQ ID NO:86, SEQ ID NO:88, SEQ ID NO:90, SEQ ID NO:92, SEQ ID NO:94, SEQ ID NO:96, SEQ ID NO:98, SEQ ID NO:100, SEQ ID NO:102, SEQ ID NO:104, SEQ ID NO:106, and all nucleic acids disclosed in the SEQ ID listing, which include all even numbered SEQ ID NO:s from SEQ ID NO:2 through SEQ ID NO:1073, and a second member having a sequence as set forth by about the first (the 5′) 12, 13, 14, 15, 16, 17, 18, 19, 20, 21, 22, 23, 24, 25, 26, 27, 28, 29 or 30 or more residues of the complementary strand of the first member.

34. A polypeptide-encoding nucleic acid generated by amplification of a polynucleotide using an amplification primer pair as set forth in claim 33.

35-37. (canceled)

38. An isolated or recombinant polypeptide encoded by a nucleic acid as set forth in claim 34.

39. A method of amplifying a nucleic acid encoding a polypeptide having an enzyme, structural or binding activity comprising amplification of a template nucleic acid with an amplification primer sequence pair capable of amplifying a nucleic acid sequence as set forth in claim 1, or a subsequence thereof.

40. A method for making an polypeptide comprising amplification of a nucleic acid with an amplification primer pair as set forth in claim 33 and expression of the amplified nucleic acid.

41. An expression cassette comprising a nucleic acid comprising a sequence as set forth in claim 1.

42. A vector comprising a nucleic acid comprising a sequence as set forth in claim 1.

43. A cloning vehicle comprising a nucleic acid comprising a sequence as set forth in claim 1, wherein the cloning vehicle comprises a viral vector, a plasmid, a phage, a phagemid, a cosmid, a fosmid, a bacteriophage or an artificial chromosome.

44-45. (canceled)

46. A transformed cell comprising a nucleic acid comprising a sequence as set forth in claim 1.

47-48. (canceled)

49. A transgenic non-human animal comprising a sequence as set forth in claim 1.

50. (canceled)

51. A transgenic plant comprising a sequence as set forth in claim 1.

52. (canceled)

53. A transgenic seed comprising a sequence as set forth in claim 1.

54. (canceled)

55. An antisense oligonucleotide comprising a nucleic acid sequence complementary to or capable of hybridizing under stringent conditions to a sequence as set forth in claim 1, or a subsequence thereof.

56. (canceled)

57. A method of inhibiting the translation of an polypeptide message in a cell comprising administering to the cell or expressing in the cell an antisense oligonucleotide comprising a nucleic acid sequence complementary to or capable of hybridizing under stringent conditions to a sequence as set forth in claim 1.

58. A double-stranded inhibitory RNA (RNAi) molecule comprising a subsequence of a sequence as set forth in claim 1.

59. (canceled)

60. A method of inhibiting the expression of an polypeptide in a cell comprising administering to the cell or expressing in the cell a double-stranded inhibitory RNA (iRNA), wherein the RNA comprises a subsequence of a sequence as set forth in claim 1.

61. An isolated or recombinant polypeptide (i) having at least 50% sequence identity to SEQ ID NO:3, SEQ ID NO:5, SEQ ID NO:7, SEQ ID NO:9, SEQ ID NO:11, SEQ ID NO:13, SEQ ID NO:15; SEQ ID NO:17, SEQ ID NO:19, SEQ ID NO:21, SEQ ID NO:23, SEQ ID NO:25, SEQ ID NO:27, SEQ ID NO:29, SEQ ID NO:31, SEQ ID NO:33, SEQ ID NO:35, SEQ ID NO:37, SEQ ID NO:39, SEQ ID NO:41, SEQ ID NO:43, SEQ ID NO:45, SEQ ID NO:47, SEQ ID NO:49, SEQ ID NO:51, SEQ ID NO:53, SEQ ID NO:55, SEQ ID NO:57, SEQ ID NO:59, SEQ ID NO:61, SEQ ID NO:63, SEQ ID NO:65, SEQ ID NO:67, SEQ ID NO:69, SEQ ID NO:71, SEQ ID NO:73, SEQ ID NO:75, SEQ ID NO:77, SEQ ID NO:79, SEQ ID NO:81, SEQ ID NO:83, SEQ ID NO:85, SEQ ID NO:87, SEQ ID NO:89, SEQ ID NO:91, SEQ ID NO:93, SEQ ID NO:95, SEQ ID NO:97, SEQ ID NO:99, SEQ ID NO:101, SEQ ID NO:103, SEQ ID NO:105, and all polypeptides disclosed in the SEQ ID listing, which include all odd numbered SEQ ID NO:s from SEQ ID NO:3 through SEQ ID NO:1073, over a region of at least about 100 residues, wherein the sequence identities are determined by analysis with a sequence comparison algorithm or by a visual inspection, or, (ii) encoded by a nucleic acid having at least 50% sequence identity to a sequence as set forth in SEQ ID NO:1, SEQ ID NO:2, SEQ ID NO:4, SEQ ID NO:6, SEQ ID NO:8, SEQ ID NO:10, SEQ ID NO:12, SEQ ID NO:14, SEQ ID NO:16, SEQ ID NO:18, SEQ ID NO:20, SEQ ID NO:22, SEQ ID NO:24, SEQ ID NO:26, SEQ ID NO:28, SEQ ID NO:30, SEQ ID NO:32, SEQ ID NO:34, SEQ ID NO:36, SEQ ID NO:38, SEQ ID NO:40, SEQ ID NO:42, SEQ ID NO:44, SEQ ID NO:46, SEQ ID NO:48, SEQ ID NO:50, SEQ ID NO:52, SEQ ID NO:54, SEQ ID NO:56, SEQ ID NO:58, SEQ ID NO:60, SEQ ID NO:62, SEQ ID NO:64, SEQ ID NO:66, SEQ ID NO:68, SEQ ID NO:70, SEQ ID NO:72, SEQ ID NO:74, SEQ ID NO:76, SEQ ID NO:78, SEQ ID NO:80, SEQ ID NO:82, SEQ ID NO:84, SEQ ID NO:86, SEQ ID NO:88, SEQ ID NO:90, SEQ ID NO:92, SEQ ID NO:94, SEQ ID NO:96, SEQ ID NO:98, SEQ ID NO:100, SEQ ID NO:102, SEQ ID NO:104, SEQ ID NO:106, and all nucleic acids disclosed in the SEQ ID listing, which include all even numbered SEQ ID NO:s from SEQ ID NO:2 through SEQ ID NO:1073, over a region of at least about 100 residues, and the sequence identities are determined by analysis with a sequence comparison algorithm or by a visual inspection, or encoded by a nucleic acid capable of hybridizing under stringent conditions to a sequence as set forth in SEQ ID NO:1, SEQ ID NO:2, SEQ ID NO:4, SEQ ID NO:6, SEQ ID NO:8, SEQ ID NO:10, SEQ ID NO:12, SEQ ID NO:14, SEQ ID NO:16, SEQ ID NO:18, SEQ ID NO:20, SEQ ID NO:22, SEQ ID NO:24, SEQ ID NO:26, SEQ ID NO:28, SEQ ID NO:30, SEQ ID NO:32, SEQ ID NO:34, SEQ ID NO:36, SEQ ID NO:38, SEQ ID NO:40, SEQ ID NO:42, SEQ ID NO:44, SEQ ID NO:46, SEQ ID NO:48, SEQ ID NO:50, SEQ ID NO:52, SEQ ID NO:54, SEQ ID NO:56, SEQ ID NO:58, SEQ ID NO:60, SEQ ID NO:62, SEQ ID NO:64, SEQ ID NO:66, SEQ ID NO:68, SEQ ID NO:70, SEQ ID NO:72, SEQ ID NO:74, SEQ ID NO:76, SEQ ID NO:78, SEQ ID NO:80, SEQ ID NO:82, SEQ ID NO:84, SEQ ID NO:86, SEQ ID NO:88, SEQ ID NO:90, SEQ ID NO:92, SEQ ID NO:94, SEQ ID NO:96, SEQ ID NO:98, SEQ ID NO:100, SEQ ID NO:102, SEQ ID NO:104, SEQ ID NO:106, and all nucleic acids disclosed in the SEQ ID listing, which include all even numbered SEQ ID NO:s from SEQ ID NO:2 through SEQ ID NO:1073.

62-64. (canceled)

65. The isolated or recombinant polypeptide of claim 61, wherein the polypeptide has an enzyme, structural or binding activity.

66. The isolated or recombinant polypeptide of claim 65, wherein the enzyme, structural or binding activity comprises a recombinase activity, a helicase activity, a DNA replication activity, a DNA recombination activity, an isomerase, a transisomerase activity, topoisomerase activity, a methyl transferase activity, an aminotransferase activity, a uracil-5-methyl transferase activity, a cysteinyl tRNA synthetase activity, a hydrolase, an esterase activity, a phosphoesterase activity, an acetylmuramyl pentapeptide phosphotransferase activity, a glycosyltransferase activity, an acetyltransferase activity, an acetylglucosamine phosphate transferase activity, a centromere binding activity, a telomerase activity, a transcriptional regulatory activity, a heat shock protein activity, a protease activity, a proteinase activity, a peptidase activity, a carboxypeptidase activity, an endonuclease activity, an exonuclease activity, a RecB family exonuclease activity, a polymerase activity, a carbamoyl phosphate synthetase activity, a methyl-thioadenine synthetase activity, an oxidoreductase activity, an Fe—S oxidoreductase activity, a flavodoxin reductase activity, a permease activity, a thymidylate activity, a dehydrogenase activity, a pyrophosphorylase activity, a coenzyme metabolism activity, a dinucleotide-utilizing enzyme activity, a molybdopterin or thiamine biosynthesis activity, a beta-lactamase activity, a ligand binding activity, an ion transport activity, an ion metabolism activity, a tellurite resistance protein activity, an inorganic ion transport activity, a nucleotide transport activity, a nucleotide metabolism activity, an actin, a myosin activity, a lipase activity or a lipid acyl hydrolase (LAH) activity, a cell envelop biogenesis activity, an outer membrane synthesis activity, a ribosomal structure synthesis activity, a translational processing activity, a transcriptional initiation activity, a TATA-binding activity, a signal transduction activity, an energy metabolism activity, an ATPase activity, an information storage activity, a processing activity, or a combination thereof.

67-82. (canceled)

83. An isolated or recombinant polypeptide comprising a polypeptide as set forth in claim 61 and lacking a signal sequence.

84. An isolated or recombinant polypeptide comprising a polypeptide as set forth in claim 61 and having a heterologous signal sequence.

85-92. (canceled)

93. A protein preparation comprising a polypeptide as set forth in claim 61, wherein the protein preparation comprises a liquid, a solid or a gel.

94. A heterodimer comprising a polypeptide as set forth in claim 61 and a second domain.

95. The heterodimer of claim 94, wherein the second domain is a polypeptide and the heterodimer is a fusion protein.

96. (canceled)

97. A homodimer comprising a polypeptide as set forth in claim 61.

98. An immobilized polypeptide, wherein the polypeptide comprises a sequence as set forth in claim 61, or a subsequence thereof.

99. (canceled)

100. An array comprising an immobilized polypeptide as set forth in claim 61 or comprising an immobilized nucleic acid as set forth in claim 1.

101. (canceled)

102. An isolated or recombinant antibody that specifically binds to a polypeptide as set forth in claim 61.

103. (canceled)

104. A hybridoma comprising an antibody that specifically binds to a polypeptide as set forth in claim 61.

105. A method of isolating or identifying a polypeptide comprising the steps of:
(a) providing an antibody as set forth in claim 102;
(b) providing a sample comprising polypeptides; and
(c) contacting the sample of step (b) with the antibody of step (a) under conditions wherein the antibody can specifically bind to the polypeptide, thereby isolating or identifying the polypeptide.

106-107. (canceled)

108. A method of producing a recombinant polypeptide comprising the steps of: (a) providing a nucleic acid operably linked to a promoter, wherein the nucleic acid comprises a sequence as set forth in claim 1 or claim 24; and (b) expressing the nucleic acid of step (a) under conditions that allow expression of the polypeptide, thereby producing a recombinant polypeptide.

109. (canceled)

110. A method for identifying a polypeptide having an enzyme activity comprising the following steps:
(a) providing a polypeptide as set forth in claim 65;
(b) providing an enzyme substrate; and
(c) contacting the polypeptide with the substrate of step (b) and detecting a decrease in the amount of substrate or an increase in the amount of a reaction product, wherein a decrease in the amount of the substrate or an increase in the amount of the reaction product detects a polypeptide having an enzyme activity.

111. A method for identifying an enzyme substrate comprising the following steps:
(a) providing a polypeptide as set forth in claim 65;
(b) providing a test substrate; and
(c) contacting the polypeptide of step (a) with the test substrate of step (b) and detecting a decrease in the amount of substrate or an increase in the amount of reaction product, wherein a decrease in the amount of the substrate or an increase in the amount of a reaction product identifies the test substrate as an enzyme substrate.

112. A method of determining whether a test compound specifically binds to a polypeptide comprising the following steps:
(a) expressing a nucleic acid or a vector comprising the nucleic acid under conditions permissive for translation of the nucleic acid to a polypeptide, wherein the nucleic acid has a sequence as set forth in claim 1;
(b) providing a test compound;
(c) contacting the polypeptide with the test compound; and
(d) determining whether the test compound of step (b) specifically binds to the polypeptide.

113. A method of determining whether a test compound specifically binds to a polypeptide comprising the following steps:
(a) providing a polypeptide as set forth in claim 61;
(b) providing a test compound;
(c) contacting the polypeptide with the test compound; and
(d) determining whether the test compound of step (b) specifically binds to the polypeptide.

114. A method for identifying a modulator of an enzyme activity comprising the following steps:
(a) providing a polypeptide as set forth in claim 65;
(b) providing a test compound;
(c) contacting the polypeptide of step (a) with the test compound of step (b) and measuring an activity of the enzyme, wherein a change in the enzyme activity measured in the presence of the test compound compared to the activity in the absence of the test compound provides a determination that the test compound modulates the enzyme activity.

115-117. (canceled)

118. A computer system comprising a processor and a data storage device wherein said data storage device has stored thereon a polypeptide sequence or a nucleic acid sequence, wherein the polypeptide sequence comprises sequence as set forth in claim 61, or a polypeptide encoded by a nucleic acid as set forth in claim 1.

119-121. (canceled)

122. A computer readable medium having stored thereon a polypeptide sequence or a nucleic acid sequence, wherein the polypeptide sequence comprises a polypeptide as set forth in claim 61; or, a polypeptide encoded by a nucleic acid as set forth in claim 1.

123. A method for identifying a feature in a sequence comprising the steps of: (a) reading the sequence using a computer program which identifies one or more features in a sequence, wherein the sequence comprises a polypeptide sequence or a nucleic acid sequence, wherein the polypeptide sequence comprises a polypeptide as set forth in claim 61; a polypeptide encoded by a nucleic acid as set forth in claim 1; and (b) identifying one or more features in the sequence with the computer program.

124. A method for comparing a first sequence to a second sequence comprising the steps of: (a) reading the first sequence and the second sequence through use of a computer program which compares sequences, wherein the first sequence comprises a polypeptide sequence or a nucleic acid sequence, wherein the polypeptide sequence comprises a polypeptide as set forth in claim 61 or a polypeptide encoded by a nucleic acid as set forth in claim 1; and (b) determining differences between the first sequence and the second sequence with the computer program.

125-127. (canceled)

128. A method for isolating or recovering a nucleic acid encoding a polypeptide with an enzyme activity from an environmental sample comprising the steps of:
(a) providing an amplification primer sequence pair as set forth in claim 33;
(b) isolating a nucleic acid from the environmental sample or treating the environmental sample such that nucleic acid in the sample is accessible for hybridization to the amplification primer pair; and,
(c) combining the nucleic acid of step (b) with the amplification primer pair of step (a) and amplifying nucleic acid from the environmental sample, thereby isolating or recovering a nucleic acid encoding a polypeptide with an enzyme activity from an environmental sample.

129. (canceled)

130. A method for isolating or recovering a nucleic acid encoding a polypeptide with an enzyme activity from an environmental sample comprising the steps of:
(a) providing a polynucleotide probe comprising a sequence as set forth in claim 1, or a subsequence thereof;
(b) isolating a nucleic acid from the environmental sample or treating the environmental sample such that nucleic acid in the sample is accessible for hybridization to a polynucleotide probe of step (a);
(c) combining the isolated nucleic acid or the treated environmental sample of step (b) with the polynucleotide probe of step (a); and
(d) isolating a nucleic acid that specifically hybridizes with the polynucleotide probe of step (a), thereby isolating or recovering a nucleic acid encoding a polypeptide with an enzyme activity from an environmental sample.

131-132. (canceled)

133. A method of generating a variant of a nucleic acid encoding a polypeptide with an enzyme activity comprising the steps of:
(a) providing a template nucleic acid comprising a sequence as set forth in claim 1; and
(b) modifying, deleting or adding one or more nucleotides in the template sequence, or a combination thereof, to generate a variant of the template nucleic acid.

134-142. (canceled)

143. A method for modifying codons in a nucleic acid encoding a polypeptide with an enzyme activity to increase its expression in a host cell, the method comprising the following steps:
(a) providing a nucleic acid encoding a polypeptide with an enzyme activity comprising a sequence as set forth in claim 1; and,
(b) identifying a non-preferred or a less preferred codon in the nucleic acid of step (a) and replacing it with a preferred or neutrally used codon encoding the same amino acid as the replaced codon, wherein a preferred codon is a codon over-represented in coding sequences in genes in the host cell and a non-preferred or less preferred codon is a codon under-represented in coding sequences in genes in the host cell, thereby modifying the nucleic acid to increase its expression in a host cell.

144. A method for modifying codons in a nucleic acid encoding an enzyme polypeptide, the method comprising the following steps:
(a) providing a nucleic acid encoding a polypeptide with an enzyme activity comprising a sequence as set forth in claim 1; and,
(b) identifying a codon in the nucleic acid of step (a) and replacing it with a different codon encoding the same amino acid as the replaced codon, thereby modifying codons in a nucleic acid encoding an enzyme.

145. A method for modifying codons in a nucleic acid encoding an enzyme polypeptide to increase its expression in a host cell, the method comprising the following steps:
(a) providing a nucleic acid encoding an enzyme polypeptide comprising a sequence as set forth in claim 1; and,
(b) identifying a non-preferred or a less preferred codon in the nucleic acid of step (a) and replacing it with a preferred or neutrally used codon encoding the same amino acid as the replaced codon, wherein a preferred codon is a codon over-represented in coding sequences in genes in the host cell and a non-preferred or less preferred codon is a codon under-represented in coding sequences in genes in the host cell, thereby modifying the nucleic acid to increase its expression in a host cell.

146. A method for modifying a codon in a nucleic acid encoding a polypeptide having an enzyme activity to decrease its expression in a host cell, the method comprising the following steps:
(a) providing a nucleic acid encoding an enzyme polypeptide comprising a sequence as set forth in claim 1; and
(b) identifying at least one preferred codon in the nucleic acid of step (a) and replacing it with a non-preferred or less preferred codon encoding the same amino acid as the replaced codon, wherein a preferred codon is a codon over-represented in coding sequences in genes in a host cell and a non-preferred or less preferred codon is a codon under-represented in coding sequences in genes in the host cell, thereby modifying the nucleic acid to decrease its expression in a host cell.

147. (canceled)

148. A method for producing a library of nucleic acids encoding a plurality of modified enzyme active sites or substrate binding sites, wherein the modified active sites or substrate binding sites are derived from a first nucleic acid comprising a sequence encoding a first active site or a first substrate binding site the method comprising the following steps:
(a) providing a first nucleic acid encoding a first active site or first substrate binding site, wherein the first nucleic acid sequence comprises a sequence that hybridizes under stringent conditions to a sequence as set forth in SEQ ID NO:1, SEQ ID NO:2, SEQ ID NO:4, SEQ ID NO:6, SEQ ID NO:8, SEQ ID NO:10, SEQ ID NO:12, SEQ ID NO:14, SEQ ID NO:16, SEQ ID NO:18, SEQ ID NO:20, SEQ ID NO:22, SEQ ID NO:24, SEQ ID NO:26, SEQ ID NO:28, SEQ ID NO:30, SEQ ID NO:32, SEQ ID NO:34, SEQ ID NO:36, SEQ ID NO:38, SEQ ID NO:40, SEQ ID NO:42, SEQ ID NO:44, SEQ ID NO:46, SEQ ID NO:48, SEQ ID NO:50, SEQ ID NO:52, SEQ ID NO:54, SEQ ID NO:56, SEQ ID NO:58, SEQ ID NO:60, SEQ ID NO:62, SEQ ID NO:64, SEQ ID NO:66, SEQ ID NO:68, SEQ ID NO:70, SEQ ID NO:72, SEQ ID NO:74, SEQ ID NO:76, SEQ ID NO:78, SEQ ID NO:80, SEQ ID NO:82, SEQ ID NO:84, SEQ ID NO:86, SEQ ID NO:88, SEQ ID NO:90, SEQ 1D NO:92, SEQ ID NO:94, SEQ ID NO:96, SEQ ID NO:98, SEQ ID NO:100, SEQ ID NO:102, SEQ ID NO:104, SEQ ID NO:106, and all nucleic acids disclosed in the SEQ ID listing, which include all even numbered SEQ ID NO:s from SEQ ID NO:2 through SEQ ID NO:1073, or a subsequence thereof, and the nucleic acid encodes an enzyme active site or an enzyme substrate binding site;
(b) providing a set of mutagenic oligonucleotides that encode naturally-occurring amino acid variants at a plurality of targeted codons in the first nucleic acid; and,
(c) using the set of mutagenic oligonucleotides to generate a set of active site-encoding or substrate binding site-encoding variant nucleic acids encoding a range of amino acid variations at each amino acid codon that was mutagenized, thereby producing a library of nucleic acids encoding a plurality of modified enzyme active sites or substrate binding sites.

149-151. (canceled)

152. A method for making a small molecule comprising the following steps:
(a) providing a plurality of biosynthetic enzymes capable of synthesizing or modifying a small molecule, wherein one of the enzymes comprises an enzyme encoded by a nucleic acid comprising a sequence as set forth in claim 1;
(b) providing a substrate for at least one of the enzymes of step (a); and
(c) reacting the substrate of step (b) with the enzymes under conditions that facilitate a plurality of biocatalytic reactions to generate a small molecule by a series of biocatalytic reactions.

153. A method for modifying a small molecule comprising the following steps:
(a) providing an enzyme, wherein the enzyme comprises a polypeptide as set forth in claim 65, or a polypeptide encoded by a nucleic acid comprising a nucleic acid sequence as set forth in claim 1;
(b) providing a small molecule; and
(c) reacting the enzyme of step (a) with the small molecule of step (b) under conditions that facilitate an enzymatic reaction catalyzed by the enzyme, thereby modifying a small molecule by an enzyme enzymatic reaction.

154-157. (canceled)

158. A method for determining a functional fragment of an enzyme comprising the steps of:
(a) providing an enzyme, wherein the enzyme comprises a polypeptide as set forth in claim 65, or a polypeptide encoded by a nucleic acid as set forth in claim 1; and
(b) deleting a plurality of amino acid residues from the sequence of step (a) and testing the remaining subsequence for an enzyme activity, thereby determining a functional fragment of an enzyme.

159. (canceled)

160. A method for whole cell engineering of new or modified phenotypes by using real-time metabolic flux analysis, the method comprising the following steps:
(a) making a modified cell by modifying the genetic composition of a cell, wherein the genetic composition is modified by addition to the cell of a nucleic acid comprising a sequence as set forth in claim 1;
(b) culturing the modified cell to generate a plurality of modified cells;
(c) measuring at least one metabolic parameter of the cell by monitoring the cell culture of step (b) in real time; and,
(d) analyzing the data of step (c) to determine if the measured parameter differs from a comparable measurement in an unmodified cell under similar conditions, thereby identifying an engineered phenotype in the cell using real-time metabolic flux analysis.

161-163. (canceled)

164. A method for whole cell engineering of new or modified phenotypes by using real-time metabolic flux analysis, the method comprising the following steps:
(a) making a modified cell by modifying the genome of a cell, wherein the genome comprises a sequence as set forth in SEQ ID NO:1;
(b) culturing the modified cell to generate a plurality of modified cells;
(c) measuring at least one metabolic parameter of the cell by monitoring the cell culture of step (b) in real time; and,
(d) analyzing the data of step (c) to determine if the measured parameter differs from a comparable measurement in an unmodified cell under similar conditions, thereby identifying an engineered phenotype in the cell using real-time metabolic flux analysis.

165-166. (canceled)

167. An isolated or recombinant signal sequence consisting of a sequence as set forth in residues 1 to 16, 1 to 17, 1 to 18, 1 to 19, 1 to 20, 1 to 21, 1 to 22, 1 to 23, 1 to 24, 1 to 25, 1 to 26, 1 to 27, 1 to 28, 1 to 28, 1 to 30 or 1 to 31, 1 to 32, 1 to 33, 1 to 34, 1 to 35, 1 to 36, 1 to 37, 1 to 38, 1 to 39, 1 to 40, 1 to 41, 1 to 42, 1 to 43, 1 to 44, 1 to 45, 1 to 46, 1 to 47, 1 to 48, 1 to 49, 1 to 50, 1 to 51, 1 to 52, 1 to 53, 1 to 54, 1 to 55, of SEQ ID NO:3, SEQ ID NO:5, SEQ ID NO:7, SEQ ID NO:9, SEQ ID NO: 11, SEQ ID NO:13, SEQ ID NO:15, SEQ ID NO:17, SEQ ID NO:19, SEQ ID NO:21, SEQ ID NO:23, SEQ ID NO:25, SEQ ID NO:27, SEQ ID NO:29, SEQ ID NO:31, SEQ ID NO:33, SEQ ID NO:35, SEQ ID NO:37, SEQ ID NO:39, SEQ ID NO:41, SEQ ID NO:43, SEQ ID NO:45, SEQ ID NO:47, SEQ ID NO:49, SEQ ID NO:51, SEQ ID NO:53, SEQ ID NO:55, SEQ ID NO:57, SEQ ID NO:59, SEQ ID NO:61, SEQ ID NO:63, SEQ ID NO:65, SEQ ID NO:67, SEQ ID NO:69, SEQ ID NO:71, SEQ ID NO:73, SEQ ID NO:75, SEQ ID NO:77, SEQ ID NO:79, SEQ ID NO:81, SEQ ID NO:83, SEQ ID NO:85, SEQ ID NO:87, SEQ ID NO:89, SEQ ID NO:91, SEQ ID NO:93, SEQ ID NO:95, SEQ ID NO:97, SEQ ID NO:99, SEQ ID NO:101, SEQ ID NO:103, SEQ ID NO:105, and all polypeptides disclosed in the SEQ ID listing, which include all odd numbered SEQ ID NO:s from SEQ ID NO:3 through SEQ ID NO:1073.

168. A chimeric polypeptide comprising at least a first domain comprising signal peptide (SP) having a sequence as set forth in claim 164, and at least a second domain comprising a heterologous polypeptide or peptide, wherein the heterologous polypeptide or peptide is not naturally associated with the signal peptide (SP).

169-170. (canceled)

171. An isolated or recombinant nucleic acid encoding a chimeric polypeptide, wherein the chimeric polypeptide comprises at least a first domain comprising signal peptide (SP having a sequence as set forth in claim 164 and at least a second domain comprising a heterologous polypeptide or peptide, wherein the heterologous polypeptide or peptide is not naturally associated with the signal peptide (SP).

172. A method of increasing thermotolerance or thermostability of an enzyme polypeptide, the method comprising glycosylating an enzyme, wherein the polypeptide comprises at least thirty contiguous amino acids of a polypeptide as set forth in claim 61, or a polypeptide encoded by a nucleic acid as set forth in claim 1, thereby increasing the thermotolerance or thermostability of the enzyme.

173. A method for overexpressing a recombinant enzyme in a cell comprising expressing a vector comprising a nucleic acid sequence as set forth in claim 1, wherein overexpression is effected by use of a high activity promoter, a dicistronic vector or by gene amplification of the vector.

174. A method of making a transgenic plant comprising the following steps:
(a) introducing a heterologous nucleic acid sequence into the cell, wherein the heterologous nucleic sequence comprises a sequence as set forth in claim 1, thereby producing a transformed plant cell; and
(b) producing a transgenic plant from the transformed cell.

175-176. (canceled)

177. A method of expressing a heterologous nucleic acid sequence in a plant cell comprising the following steps:
(a) transforming the plant cell with a heterologous nucleic acid sequence operably linked to a promoter, wherein the heterologous nucleic sequence comprises a sequence as set forth in claim 1; and
(b) growing the plant under conditions wherein the heterologous nucleic acids sequence is expressed in the plant cell.

178. An isolated hyperthermophile Nanoarchaeum equitans deposited as ATCC accession no.

179. A method for a building a genome having a desired biological requirement, a desired biological property or a desired metabolic pathway comprising the following steps:
(a) providing a minimal autonomous genome, wherein the genome comprises a sequence as set forth in SEQ ID NO:1; and
(b) adding back to the minimal autonomous genome of step (a) one or more desired genes, thereby building a genome having a desired biological requirement, a desired biological property or a desired metabolic pathway.

180. (canceled)

181. A method for a building a minimal autonomous genome comprising the following steps:
(a) providing a genome comprising a sequence as set forth in SEQ ID NO:1; and
(b) performing global knockout mutagenesis on the genome, or adding genes to the genome, and determining whether a cell comprising the genome can survive or replicate autonomously, thereby building an autonomous minimal genome.
